United States Patent Application Publication US 2026/0366045 A1, published November 19, 2026 (application 19/480,845).

The application's sequence listing, which the Patent Office published only in electronic form, follows.

SEQUENCE LISTING (314 sequences)

SEQ ID NO: 1 - protein, 345 aa, Mariniphaga sediminis
MKALVLDEYNQLNYRDFPEPEIHSGEVLIEIKACGICGSDVHGMDGSTGRRKPPLVMGHEASGVIIETGSDVKNWKTGDRVTFDSTVYPLNDWFTLKGHYNLSNNRQVLGVSPGEYRRHGAFAERLAVPQHILHRIPENVSFVEAAMVEPIAVAAHAVNVSGLKPGNSAMVAGAGMVGVFVVQLLKLFGANPVVVIDIDHKKLKLAHEFGADFTFNPKEKDIDERILQLTKSRGFDLTFEVVGITETVQTCITNTRKGGTVVLVGNLSPEIQFPLQKVVTSEITVQGSCAIKGEYELALDLLAAKKVDVSKLVSAVAPLSEGAEWFKRLYEKEPGLNKVILIPDK

SEQ ID NO: 2 - protein, 325 aa, unidentified
  source 1..325: note = Candidatus Dormibacteraeota bacterium
MKAMVWLGPERMEVRDLPAPRPGAGEVLVQTEAAGICGSEVEAYLGRMANRTPPLVMGHEYAGLVTEVGEGVDRVWSRRRVAVNPIVGCGRCRNCAAGDRNLCPDRHLLGIAAPGGFAAFSVVPERCLFSLPEGMDARLGALTKPLANGVHLIRKSGAGRGRVVVIGAGTIGLGCLQAALLHGAEQVDVVERHPGRRRHALALGARQAVAELADVEPGADLVVDAAGSEATRRAAVELVGPAGTASFVGLHSDETVLPWHRIIRANIRVQGTFGYADRDFQQALDWLAAGKAAIPLSELRPLDDGPAAFERLARGPIDEIKVFLA

SEQ ID NO: 3 - protein, 337 aa, unidentified
  source 1..337: note = Candidatus Falkowbacteria bacterium
MKSLIYYGPHDLRYGDSPKPKIRSGEVLLRIKSVGICGTDLHIYNGGMKNLPLPLIMGHEFSGVIEELARDVKNFKVGDRVIAEHVINCGKCSYCLSGKPNLCANSRIIGVHRPGALAEYLAVPADLVYKIPAKLSFEEGAMIEPLSIAYYAVKQARSILGKKVAVIGQGPIGLLLDQILRDAGAEVIGIDIADWRLKLAKKKKWADHTINSSQKTWLKKIQKIAPEGVDTVFEVVGREETAEMAIEIARRDGDVFILGVFESAASLNMMNIVKKELNVFGSWTCAFSFPPSIALAVAKKVDLKSLITNRYDVKDGALAFKESASYKGKRIKTVINF

SEQ ID NO: 4 - protein, 347 aa, unidentified
  source 1..347: note = Acidobacteria bacterium
MKAMLLSQYRRLEIAELPTPIPGRGELLIHVAACGICGSDVHGYDGSSGRRIPPIVMGHEAAGRVAALGPQVTGWSEGDRVTFDSTISCGTCPYCSRGEINLCDRRQVLGVSCGDYRCAGAFAEYVIVPQRIAYKLPDALSFSEAATLEAVAVAVHAVSLSQVSPGTQALVIGAGMIGLLTLQALRAAGCSSVVIADVDASRLRLAKEVGATETLNATGDEFVAEIFKRTNGAGTDLAVEAVGIDATVRTAINSVRKGGTVTLVGNITPEVTLPLQKVVTRQIRIQGSCASAGEYPRAIQLLTSGAIKVKPLITAVAPLEDGPQWFERLYSREPNLMKVVLTPGSVS

SEQ ID NO: 5 - protein, 344 aa, unidentified
  source 1..344: note = Spirochaetaceae bacterium
MKAMVLKEYKYLEIEDIPIPHIEAADELLVRVKATAICGSDIHGFDGSTGRRKPPLVMGHEASGVVESVGSEVKSLKIGDRVTFDSTVWCGECYFCRQGQVNLCDKRRVLGVSCDEYRKDGTFAEYVIVPERIVYKLPDNVAFEEAALTEPVSVAMHAFDITGMKPGENAAVIGSGLIGLLLIQIIRAYSPHLIIAFDTDEKRRKAAIEAGADIALDPQDPESHKTVLSMTNNRGVDRAFEAVGASAAIGTAIESVRKGSSVTLIGNISNKAEIPLQSVVTRQIALLGSCAISGEYPVSLALMANRTIDVRQVISAIAPLEEGPLWFERLYKREPGLLKVVLTP

SEQ ID NO: 6 - protein, 348 aa, unidentified
  source 1..348: note = Candidatus Hydrogenedentes bacterium
MKALRLYAPGDLRLEEIPIPLPRPDEVLVRVLACGICGSDIPRVFEHGTYKYPLVPGHEFSGIVEKVGSETGKDWVGRHVVVYPLIPCRQCSSCYSGLYTQCLNYDYLGSRRDGGFAEYVTVPVNNIIPVPNGISGEISAITEPCAVALHAVRKAQACVGDTVLITGAGTIGILIALWARAAGAEVFMTDIVVGKLKLARSLGFQHLLDAKQTNVSEWVKQKCKHGVDIVFETTGHPAGLETSIDSCSITGKIILVGNPSFEEMKVPAKQYGMILRKEIQITGIWNSLINEYPKNEWQVVLQEFKKESSLYSKIITHKVPIEGLKELFVTIYNKQVFPVKAMFINKEI

SEQ ID NO: 7 - protein, 337 aa, Rhizobium sp.
MKAVVYTQPDAVAVLEREMPALVPGEVLLRIDASGICGSDLHAYHGHDPRRKPGLVLGHEFAGTVVASSDESRLPVGRRVTANPLVTCGHCDYCLQGRDNLCANRGMVGMSRPGALSEYLAIPMRCAIAIPEDLPSVSAALTEPAATALHAVNLTMRAMSRPLPEARVLIIGGGAIGMLTGALVGAYGCRSLAVAETNALRRASVRRHLACEVLDPTANAPAESSFDVVIDAVGAAPTRHLALAATRPGGVIMHIGLQAWSSEIDMRKLTLAEITLLGTYTYTMADMHATVRALASGSFGSLEWVETRALTDAPSAFADLAAGRVAAGKVVLLPQQD

SEQ ID NO: 8 - protein, 347 aa, Citrobacter freundii
MKSVVIHAEGDVRVEERPIPHLQTDEDVLVKVVSSGLCGSDIPRIFNRGAHYYPITLGHEFSGYVESYGAGVTDLQPGDAVACVPLLPCFHCPQCERGYFSLCKQYQFVGSRSEGGNAEYVVMKRANLFRLPSDMPIEDGAFIEPITVGLHAFHLAQGCEGKNVIIVGAGTIGLLALQCARELGAKSITAIDINPQKLALAKELGATYVFNSREMSATEIHSDLENVQFDQLILETAGTPQTVTLSIEIAGPRAQLALVGTLHHDLALASGVFGQILRKELTILGSWMNYSSPWPGEEWVTAARLLTEKRLQLEPLIAHSGDAESFASAVKSLNGAPMQGKILLKLS

SEQ ID NO: 9 - protein, 346 aa, Escherichia coli
MKSVVNDTDGIVRIAESVIPEIKHQDQVRVKIASSGLCGSDLPRIFKNGAHYYPITLGHEFSGYIDAVGSGVDDLHPGDAVACVPLLPCFTCPECLKGFYSQCAKYDFIGSRRDGGFAEYIVVKRKNVFALPTDMSIEDGAFIEPITVGLHAFHLAQGCENKNVIIIGAGTIGLLAIQCAVALGAKSVTAIDISSEKLALAKSFGAMLTFNSLEMSAPQMQGVLRELRFNQLILETAGVPKTVELAVEIAGPHAQLALVGTLHQDLHLTSTTFGKILRKELTVIGSWMNYSSPWPGQEWETASRLLTERKLSLEPLIAHRGSFESFAQAVRDIARNAMPGKVLLIP

SEQ ID NO: 10 - protein, 339 aa, Escherichia coli
  source 1..339: note = Escherichia coli (strain K12)
MKSILIEKPNQLAIVEREIPTPSAGEVRVKVKLAGICGSDSHIYRGHNPFAKYPRVIGHEFFGVIDAVGEGVESARVGERVAVDPVVSCGHCYPCSIGKPNVCTTLAVLGVHADGGFSEYAVVPAKNAWKIPEAVADQYAVMIEPFTIAANVTGHGQPTENDTVLVYGAGPIGLTIVQVLKGVYNVKNVIVADRIDERLEKAKESGADWAINNSQTPLGEIFTEKGIKPTLIIDAACHPSILKEAVTLASPAARIVLMGFSSEPSEVIQQGITGKELSIFSSRLNANKFPIVIDWLSKGLIKPEKLITHTFDFQHVADAISLFEQDQKHCCKVLLTFSE

SEQ ID NO: 11 - protein, 357 aa, Lactobacillus salivarius
  source 1..357: note = Lactobacillus salivarius cp400
MNIPTKMKAVVKSEAGYDNMSLQEIPVPEVKGKQVLMKVAYTGICGTDIHTFKGEYANAVTPLVLGHEFSGKVVAVGDEVTKVKPGDRVTSETTFDTCGECVYCKNKEYNLCENRSGIGTKANGSMANYVLTREESVHVLPDNVSYKLAAMSEPLASCVHAMYQKTPFTLHDTVLIIGPGPMGLLSLQIAKEIGAFTIVSGITKDSDRLEIAKELGADIVVDTQKEDLAKIVMEATNGVGVTKVYDCSGATPAVNAALPLLKKGGTFQQVGLFAKPLNELDERTIIQHEITYVGSRSQNPYDWPIAIHLEAKGAINEDKMVTKVFDLDHWREAFEAMMAGKELKVLIASNPDDETLN

SEQ ID NO: 12 - protein, 350 aa, Clostridium difficile
MKAAVLHGTNDMRFEDIEIKPCESDEVKIKVMAAGICGSDPPRVLKHWKYPVPAIPGHEFSGVIAEVGKDVKNVKVGDRVVAIPFIPCNECEYCKRGLFSLCDDHGMLGAKSFGAFAEYVNIKATNVLPIGDMDFEDAAMIEPLAVAMHGVLNIGVQVGDTVAVMGSGTMGQLVIQGLKIAGAGTIIAVDISDNKLRESKELGADIIINAKDINPVEKIKELTGGKGVDIALECAGSKITQEQCLLITKKKSKIGFLGIAYSDITLSEEAFENIFRKELELKGFWNSYSAPFPGQEWTKGINLVNEGKIKLKEMVSHRFSLEDTYKAFEMIRDRKEEFNKILILPQGVEK

SEQ ID NO: 13 - protein, 350 aa, Clostridium difficile
MKSVRFYGIRDTRVEDVDVPKILEKDDVIIKVKVAGICGSDISKYSKTGPHMVGEILGHEFSGEVAQVGKEVRSFKIGDRVAVCPAMPCFECDECKKGLYSRCNNVAIIGNKELGGCFAEYTKVKERNLIKIPDEISYETAAALEPVCIAGHGLFRSEAKVGDTVVVLGTGPIGLFSIQWAKIFGSTKIIAVDVFDEKLDLAKELGADICINAKEKNIVEEIKRLTDGDGADIVIESAGTPLTCGQVLLLAKKGGTVLYAGVPYGDVALTREQFEKIVRSELTVKGTWFGNSFPFPGKEWSAGLYHMQKGDMNVEKLVTHRINLEEAPAYFEKVYKRDIFFGKIMINIDN

SEQ ID NO: 14 - protein, 349 aa, Lactobacillus rhamnosus
MKASMLEDLNKFSVKEIDIPSPKKDEVVVKVMAAGTCGSDSHKMISGWKYGYPAVMGHEFSGIVTQLGENVSNVSVGQHVAVAPFIPCFKCHYCQIGLFQMCENYSMLGQQKFGGFEQYVSVPARNVLDIGKMSFEEGALIEPMAVAAHAVMGIKPELGDTVAVFGLGTVGDLVVRLLISSGATNVIGIDIDDQKLEKGLDEGCTHVINSAKESLEEKIMEYTDGLGVDISMECAGSKITEEQTLLVTKRRGKVGFVGIAYSDVLLHQKAFENIFRHELTVTGFWNSYSAPFPGREWTNSIQLVNRGRIKIKDLITHRFELEDMQKAFNMITTRSESFNKVMFFPNGIN

SEQ ID NO: 15 - protein, 354 aa, Bacillus halodurans
MKALNLYGIQDLRFEETPAPSIEHDDDIIIKVKAVGICGSDLSRYKKLGPYVPGMTFGHEFAGEVVKIGRSVTGFSIGDRVAACPTYTCGQCRYCQLGEPTRCERLSVIGARHPGAYAEYVKLPAKHVIPLPNVVNYDEAALIEPASVVAHGFYRTNIKPGASVAIMGVGSIGLLAVQWAKIFGATTVFAIDIDEQKLNVANQLGADVLISSLQRPAHKQILEYTNGIGVDVAVESAGTPSTSAQVFALPKKGGEVVFLGIPYADVQIERFYFEKIVRNELHVYGSWNALSSPFPGKEWATTIHYMSSGQLNVAPMISYRLPLAKGPETFQQIAKGELKPTKVLFYPEKLSERK

SEQ ID NO: 16 - protein, 351 aa, unidentified
  source 1..351: note = Lachnospiraceae bacterium
MKVLSLHKPGDIRFEDAPMPEPGEGEVLLKVMACGVCSSDEARIFKDGAHIMPIVPGHEFCGQVVKTGAGVDESLIGRKASVFPMLPCFECPSCKRGDYATCSNYKYYGSRNDGGMGEYRAIKAWNLNLLDDSVDYCVGALSEPSAVGHHATEVGGVKAGDKVFVIGSGTIGLLIGFFAQAKGAEVWIGARRKESNDFAASLGFKTIDTNNTEDEVAKATDGNGMDVVFEAVGSNKCLIEAIGSVTAGGTLVTVGNPVGDMNLPRDVYWRILRKQLTVRGTWNSSYSDKANDWHEVAALMKEKKIPFEKLITRKYKLSQCDEAFDFFRDHSIQKSRVMFVMHEKESEAYNG

SEQ ID NO: 17 - protein, 336 aa, Faecalibacterium sp.
  source 1..336: note = Faecalibacterium sp. OF03-6AC
MVNMMKALVFTAPHTFEYRDVPRPEPAPDEVLVEVKACAICGSDVHGSSGENGRRIPPLVMGHEASGTIAQLGEAVQSWAVGDRVTFDSTEYCGYCWFCTHGMHNLCAQRRIVGVACTEYRKNGAMAQYIAVKARTLYALPPAVSFEQGCLVEPFAVGMHAVLRSGLAAGQTAAVIGDGTIGLMTLIAAKSQGAQVCISGHHTRPMQLAAQLGALDCAQLPQLTAERGADVVYDAVGSQSSFTQAMELVRKGGRIMVIGNHARTIDFPLQRCITEQIDVQFSYSSAGEYPVCLQAIAEGRADLTGLWQSFPLAEGAQVFDRLVHRDESLTKAVLIP

SEQ ID NO: 18 - protein, 357 aa, Agathobacter ruminis
MKAYVLDGIGQLNQHEYVLRDLQPGEALVQVAAAGICGSDLPRIFETGTYHFPTIPGHEFAGVVKELYADADEEMLRQWMGKRVAVFPLIPCRTCRSCANHQYEMCSNYNYLGSRTDGGFAEYCIVPVWNLLQLPDEVSFAQAAMMEPAAVALHAIRRGGLHPDHPETGIGKRVLVMGLGTIGGLIAQWLSQCGVTELTATGHHAPQEELMHRYANENYRFINTNQTAWTDDENTYDLIFDCINDSESVQQALRYVKPGGQIVAVGNPKKDLTLQKDIYWKLLRKQVCMTGTWNSSFSHDSNDDWQILLRYLQEQKLHPQALITHRLPFAQLPKGLEIMRLREEFYNKIMIDLTVCS

SEQ ID NO: 19 - protein, 342 aa, Alicyclobacillus acidoterrestris
MKAVTYTPDQGFALVEVETPQLGPDEVLLQVEACGVCGSDRQVVAGESVPTGTAFPLVMGHEIAGRIAALGETVTDWHVGDSVIVHPFVACGTCAPCVHGQPNLCVRQVCIGYQRPGGFAEQVAVPARQLVRRPAELAPAAAALVVDAFATPYHAMRAAGVESGQTVLIIGTGGLGLAALMLAMGFHVGRLGAVTRRQEGIAIAEAHGAQMVVVTDQDERTIARQLRRWSGASGIDVVIDTVATADTITLAAESVRPGGTIAIVGMSADTALYPVAKTVRRGLTFVASYGSVREDVEQLVSWVAEGRLDPVRLVAGALPLHEAARAFAPDRPAGRWVIDPSE

SEQ ID NO: 20 - protein, 357 aa, Ruminococcus sp.
  source 1..357: note = Ruminococcus sp. KGMB03662
MKSLINIPEKMKALVLYGVGDLRVTEVDVPKLEKGTVLLKIKACGICSSDMPRCFVTGTYHFPTIPGHEFSGQIVAVGDDVDESLLGKRSCVFPMLPCKHCKACKMEEYAQCSGYSYFGSRQDGAWAEYLVVPVWNLVPFDDTLDYKTAALCEPAAVSMHAVNIGDIKEGQNVVIIGTGTIGFMIALFAKERTKTGKVVIAGRSKNKLEYAKKLGFDVVDTSVDDLPAQVKKIIGIDGADVTFEAVGSNEAIASAIESTGALGSIVLVGNPSTDLILPKNIYWSILRKQITVKGSWNSSYNSRVNDWKKALEVFEHSDVNFADLITHTFTIEENEKAFSAIRNTGEFTLKVMFTFDD

SEQ ID NO: 21 - protein, 348 aa, unidentified
  source 1..348: note = Clostridiaceae bacterium
MKAVVLHGKNDICYEEWPEPILKTGTVKIHVKACGICGSDIPRVLGDSAHYYPIILGHEFSGCVTEVADDVDKIQVGDHVAGVPLLPCMKCDDCQQGNYSQCKHYSFIGSREQGGFADYVVIPADNVVKVDPTLPYEQVALFEPCTVALHALKVSSYKGGKRVAILGGGTIGLFALQWAKIYGASQVTVFGRSKEHLKIAAALGADTTISTLDDNFMTEAMRVTEKKGFDYIYESAGSTITMKLAFELAANHAKICFIGTPTENLTFSPKLWENMNRKEFQLMGSWMSCSAPFPGDEWKETAHFFNTGQLRYVPEMFFAQYPMDDVKKAFEQFHNKNKVKGRILLKNK

SEQ ID NO: 22 - protein, 337 aa, unidentified
  source 1..337: note = Thermoplasmata archaeon
MKVAVWYGDKNIVLEDRPIPSIGEKDVLVRVKSSSICGADLHAYKGLSKRRKPPLVMGHEFSGMVERLGDETKGLKVGDRVVVEPIISCGKCKACKKGKTNVCENRKLIGLNLDGAFAEYVSVPYEKCHELPRDLSFDEGAIIEPLAVAVHAVNITPISSNDNVLIIGSGVIGLLITQLLRSRTSGDILVTGRRDYLLEKAREFGATDAINVIDCDAVKTLLKKHGRVDVVFEAVGSNETVNQSISLVESGGSITLVGMLDREMTVDMMEVVAREITLRGDYGYTTDDFKEAIELASSGKVDLKGLITHVLPLDEIKKGFDILAERRENVIKVVINP

SEQ ID NO: 23 - protein, 343 aa, unidentified
  source 1..343: note = Lachnospiraceae bacterium
MKALVLEEIGKLTLKEVETPVPGRGEVLLRIHACGICSSDKARLFKNGTHTMPLIPGHEISGEIVAGGPGIREELIGRRAAVFPLIPCRQCDSCRIGKYAQCEHYDYFGSRRDGGFAEYLAVPVFNINLLPDDMDYHTAALCEPATVASHALKRAKMKSGDIVTIIGTGTVGLLAAGIARIRRASKIIIVGRSKEKIMNAAHFADHVINAEGWDVNEAVASLTEGHMSDVVLETGGNSDACTYALMAAGKGTTVMFIGNPEEPIVFNRDIYWKILRNELTLKGTWNSGYAPEDNDWNDVIRYMADGQIPADKIITDSFPLEDYNKAFELLLSDRFYTKIMFDI

SEQ ID NO: 24 - protein, 348 aa, Prevotella marshii
  source 1..348: note = Prevotella marshii DSM 16973 = JCM 13450
MKANVLYHIGDLRYTDVALPELHDGEALVRVRACGICGSDVARVFTTGTYHFPTIIGHEFSGEVVETYSAADAEWVGRRVSVFPLIPCRHCDACHHGQYEMCTCYNYLGSRTDGGFAEYVAVPVWNLFRLPDSVSYEEGAMMEPAAVAMHALKIARVGMGDTVAITGPGTIGMILTQLIQRIGGTKAVLIGRTQAKLDYARRIGIRHVCNSGTEHVADRVGQLTGGRGADIAIEGTGASEPMNLCLNLVRSEGRIVAMGNPQGDMLFRKDAYWKLLRKQLTLRGTWNSTYGLGRDDWQDISALLAEGALNLRGLITHRLPLAELQQGLSLMRDAAVYTNKVMIVDEQG

SEQ ID NO: 25 - protein, 337 aa, Blautia sp.
  source 1..337: note = Blautia sp. OM05-6
MRAYELHGVNDLRREDIEKPEIPSGWVLVQVKASGICSSDIPRIFTNGTYHFPTIPGHEFSGVVAAYGEGVPEERVGKRVGIFPLIPCRTCPQCRQKKYEMCEHYDYLGSRRDGGFAEYVAVPDWNLLELPENVSFREAAMLEPLSVALHAVKRSGVKPGDTAAVIGTGMIGFAAAAWAKALGAETVFVIGRGEAKRAIAEQIPGISYVTEEESKAIQADVVVEAVGTPQAVSSAVLLARPGGSIVLMGNPSGDLAMEKNVYWRILRKQLNLMGTWNSSYEKDEACDWTEALDALSKKKIPAQALITHCFPSEKLMDGLELMKNHKEPYCKVMVSWE

SEQ ID NO: 26 - protein, 354 aa, unidentified
  source 1..354: note = Candidatus Bathyarchaeota archaeon
MKRMRAAILYGPKDIRIENIEMPKVKPEWVLIKVRATGICGSDLHFYKEKSFIPIISDVGKGRYVPGHEFSGEVYELGSKVKGLKKGDRVGVEPIIGCGKCQWCKVGCYNLCEHYKLIGFHYIGGMAEYCVAPAENCFKLPNNVSFESAAMLDCIAVAIHAVNKAEIRGGDSVLIVGAGAIGLFALQAALIQGASDVYVVGKYEFQLEKARKLGATAVINAKNESFSEKIMEITSGKGVDKVIEAVGGASNVISDVLDVTRKKGTIVTTGIFTRPLSVDFFKILTKELTITSSWGYCYFDRRKEFGTALDFLAKEKINTQELITHKYPLEKVSEAFETALNKNKEKSIKVEIIF

SEQ ID NO: 27 - protein, 350 aa, unidentified
  source 1..350: note = Lachnospiraceae bacterium
MKAWVLHGIGDIQYEEVKEPQSAGDEVIMKVMSVGICGSDIPRIYKTGTYHFPTIPGHEFSGIVADVGAGVNPKWKNKRVGVFPLIPCHVCASCKKGQYEMCRNYGYLGSRQNGGFAEYAAVPVKNLIELPDSVSMQEAAMLEPMAVAVHAMRRARPMTGDRIVVCGLGTIGMLLVSFLRETGIRDIFVIGNKAFQRITILKTGLQENCYCDSRVQDVEKWLMERTEGKGADVFFECVGRNETISQAVNLTAPGGSVCLVGNPCSDMTLEREVYWKILRNQLTITGTWNSSFTHEIEDDWHYVLDRLEQGKISPGDLISHKFPLKNLESGLHIMRDKTQDYIKIMAEINV

SEQ ID NO: 28 - protein, 348 aa, Alkalihalobacillus ligniniphilus
MKAAVLHSENLFTYEEVEIDPCKDDEVKIKVMAAGICGSDTHKMTSKWKYPLPTIMGHEFSGFIVEIGEKVTNASIGDRVVAIPFLPCNDCEYCKRGQFSLCEDHGMVGSKSFGGFAEYVNIKSTNVLPIGDMDFEEAAMIEPLAVALHGVLNIHPRIGDIAAVFGIGTIGILTIQWLKIAGVKEVIAIDISDNKLADAHAMGCERTINPFKENLLEKIDEYTNGRGVDIAFECAGSKVTQEQCLLVTAKRGKVGYLGIAYSDVHLSEQAFENIFRRELTLKGFWNSYSAPFPGEEWTKSIDFINKGRIKLKELISHRFKLQDTQKAFDMMINREETYGKVLILPNKE

SEQ ID NO: 29 - protein, 348 aa, Jeotgalibacillus soli
MKAAVLHSENHFIYEEIDIAPCQDDEVKIKVIATGICGSDTHKMTGKWKYPLPAVMGHEFSGYIVEKGKNVTNAAIGDRVVAIPFLPCNDCEYCKRGQFSLCEDHGMVGSKSFGGFAEYVNIESSNVLPIGDMEFEEAAMIEPLAVALHGVLNIHPRVGDVAAVFGVGTIGMLTIQWLKIAGAKEIIAIDLSDEKLADARAMGCERTINPLNEDLLEKINEYTNGMGVDIAFECAGSKITQEQCLLITRKQGKIGYLGIAYSDVHLSEKAFENIFRRELTLKGFWNSYSAPFPGEEWTKSIEFIKNGRIKLKELISHRFKLEDTQKAFDMMINREEKYGKVLILPNEE

SEQ ID NO: 30 - protein, 350 aa, Heyndrickxia sporothermodurans
MKAAVLHSENEIIYQDIEISECQPNEVKVKVMAAGICGSDTHKMVSKWKYPLPAIMGHEFAGYVVEKGKDVTNVEIGDRVAAIPFIPCNECEYCLRGQFSLCENHGMIGSKSFGAFAEFVNIPAKNVLPIGEMSFEDAAMIEPSAVSLHGVLNIHPQLGDVVAVFGVGTIGILAIQWLRVAGVKEIIAIDISDKKLQDAMDLGCEKSINPLKEDLIKKIYEYTNGLGVDIAFECAGSKITQEQCLLITRKQGKVGYLGIAYSDVTLSEKAFENIFRRELTLKGFWNSYSAPFPGKEWMNTIEFVQQGKIKLKELVSHRYKLEDTQKAFNMMINREEEYNKVMIIPNEELE

SEQ ID NO: 31 - protein, 346 aa, Clostridium fungisolvens
MKAAVLHSVGDIRYENIEIKPYGDDEVKIKVKAAGICGSDPPRALKKWKYPVPAILGHEFSGYIVEVGKNVKGFKVGDRVVAVPLEPCHQCEYCKKGQFSLCESYDMLGATSFGGFAEYANVKATNVLKIDDIDYEEAAMIEPLAVALHGVLNINPQLGDTVAVLGAGTIGQLTIQWLKVSGVEKIIAVDISDKKISEAMSLGADIGINALKENPVEKIMELTNGFGVDICIECAGSKITQEQCLLVTKKKGKIGYQGIGHAGIELSEVAFEGIFRKELNIQGFWNSYSAPFPGQEWFKSIEYVKQKKIKLKQLISHRFSLEDTAKAFEMIGERKEEYNKIMIVQD

SEQ ID NO: 32 - protein, 348 aa, Alkalihalobacillus nanhaiisediminis
MKAAVLHSENHFIYQDMESFECQNDEVKIKVMAAGICGSDTHKMVSKWKYPLPAIMGHEFSGYVVEKGSDVANVEIGDRVVAIPFLPCHTCEYCKSGVYSLCEDHGMIGSKSYGGFAEYVNLKATNVLPIGNMDFEEAAMIEPLAVALHGVLHIQPRLGDVAAVFGVGTIGMLAIQWLKIAGVKEIIAIDISDEKLAEAKAMGCERTINPLQDNLIEKVHEYTNGLGVDVALECAGSKITQEQCLLITRKKGEIGYLGIAYSNVVLSEQAFENIFRKELTLKGFWNCYSAPFPGEEWTKSIDFILKGRIKLKELISHRFPLEETQKAFDLMINRKETYGKVMIIPNKE

SEQ ID NO: 33 - protein, 348 aa, Neobacillus cucumis
MKAAVLHSENQIVFQEFEIGELKPDEVKVKVMAAGICGSDTHKMVSKWKYPLPAIMGHEFAGYIVEKGKDVVHVEVGDRVAGIPFVPCNDCEYCFRGQFSLCENHGMVGSKSFGAFAEYVNIPAKNVLPIGDMDFEDAAMIEPSAVALHGVLNIHPQIGDVVAVFGVGTIGILALQWLKVAGVKEIIAIDISDKKLQDAIALGCERTINPLKENLLEKIHEYTNGLGVDIAIECAGSKITQEQCLLITRKQGKVGYLGIAYSDINLSEKAFENIFRRELKINGFWNSYSAPFPGKEWTNTVEYVKQGKIKLKELISHRFGLEDTQQAFNMIINREEEYNKVMIVPNGE

SEQ ID NO: 34 - protein, 341 aa, Staphylococcus aureus
MINQVYQLVAPRQFDVTYNNVDIYGNHVIVRPLYLSICAADQRYYTGRRDENVLRKKLPMSLVHEAVGEVVFDSKGVFEKGTKVVMVPNTPTEQHHIIAENYLASSYFRSSGYDGFMQDYVVMAHDRIVPLPNDIDLSTISYTELVSVSYHAIQRFERKSIPLKNSFGIWGDGNLGYITAILLRKLYPEAKIYVFGKTDYKLSHFSFVDDIFTVNQIPDDLKIDHAFECVGGKGSQVALQQIVEHISPEGSIALLGVSELPVEVNTRLVLEKGLTLIGSSRSGSKDFEQVVDLYRKYPDIVEKLALLKGHEINVCTLQDIVQAFEMDLSTSWGKTVLKWTI

SEQ ID NO: 35 - protein, 350 aa, Staphylococcus aureus
  source 1..350: note = Staphylococcus aureus subsp. aureus 71193
MLLFEVVLPMINQVYQLVAPRQFEVTYNNVDIYSDYVIVRPLYMSICAADQRYYTGSRDENVLSQKLPMSLIHEGVGEVVFDSKGVFNKGTKVVMVPNTPTEKDDVIAENYLKSSYFRSSGHDGFMQDFVLLNHDRAVPLPDDIDLSIISYTELVTVSLHAIRRFEKKSISNKNTFGIWGDGNLGYITAILLRKLYPESKIYVFGKTDYKLSHFSFVDDVFFINKIPEGLTFDHAFECVGGRGSQSAINQMIDYISPEGSIALLGVSEFPVEVNTRLVLEKGLTLIGSSRSGSKDFQDVVDLYIQYPDIVDKLALLKGQEFEIATINDLTEAFEADLSTSWGKTVLKWIM

SEQ ID NO: 36 - protein, 341 aa, Eubacterium ventriosum
MINTVYQLVAPRRFEIKYSDIDLNNNKVIVRPTYLSICNADQRYYQGLRDAEILRKKLPMALIHEAIGEVVRDPSGNFKTGELVVMVPNTPVEEDDIIAENYLRSSKFRASGFDGFMQEYVEITPDRLVRLPQNIDRTVAAFTEIVSVSVHAIGRFDKIAHKRRNVVGIWGDGNLGYITAVFFKTMFPETKLYIFGVNPDKLQDFTFADATFTVEHIPEDVKIDHAFECVGGAGSGKAINQIIDYINPEGTISILGVSEYPVPINTRMVLEKGLRIFGSSRSGVADFEKTVALYKSNPEIINYLSNIVGAVVPVRTIEDMKKAFEMDIQKAFGKTIMMWDK

SEQ ID NO: 37 - protein, 343 aa, Pradoshia sp.
  source 1..343: note = Pradoshia sp. D12
MINQVYRLVSPRQFEVAYNDRSLQYHEDFVVVRPTHLSICAADQRYYTGSRGKEAMAKKLPMALIHEAIGKVVYDPKGEIKNGTMVVMIPNTPTEKDEVIGENYLRSSKFRSSGYDGFMQDYVFMGRDRIVELPEGIDPYVVAFTELMTITTHVLSRFESRSHKRRNVFGVWGDGNLGFITTLFLKKMYKDCKVIIFGKTGYKLDNFSFVDEVYTIDEIPEDLRIDHAFECVGGKGSQYAIDQMIDHLHPEGSIALMGVSEFPVEVNTRMILEKGITLIGSSRSGREDFVRTVNFLKENPDVVEYLGTLVGEVQEVKTISDILSAFEKDLTSSWGKTVMEWKI

SEQ ID NO: 38 - protein, 341 aa, Lactobacillus plantarum
  source 1..341: note = Lactobacillus plantarum EGD-AQ4
MLNQVYRLVDPRQIEVQTVAEEITDNDIVVRPKYLSVCHADTRYFTGQRPQATLRQKLPMALIHEGVGEVVKDPQNKFKPGTLVAMVPNTPFETDPIIKENYLPTSKFRSSGYDGFMQEYVTLHRDRAIVVPDNFDHQMSAFIEMVSVGVHALTQLEAVMDADRKIIGIWGDGNLGFITATLVKQIFPDSQLMIFGRHRSKLDYFSFADKTYLVDDIPSDLQVSQALECTGGRGSESAIAQIIQHIRPMGTAILMGVSEDPVGIDTRSVLAEGLTLRGVSRSGRADFQRAIDILTKSPVTRERLQNLVGFTRKVSTIQDITDFFEGALTNYWGKAVMEWDV

SEQ ID NO: 39 - protein, 337 aa, Ruminococcus sp.
  source 1..337: note = uncultured Ruminococcus sp.
MINYVYQLVSPHVFSLKYEEVDFKKEVIIRPKCMAVCHADQRYFLGRRDAKILRQKLPMALIHECCGQVVWDGTGSFQRGQKVVLIPNVPGRDDGVTYENYAEGSRFLSSGCDGFMREYVNLSPDRVVPFEQVPLPVAAITEFVSVAVHAAGRFMRAAHTRREAIGVWGDGSLAYVVCCVLRRLLPESRIFVVGKHERKLLQFSFADRTFLFDSLPEDFHIDHAFECTGGEGSYYAIDDIITAVRPQGAVMLMGVSENRVPVRTRDILEKGLTFTGCSRSGREDFVKAVELMEQPQFQKRLSAIIYEDRPVHTVADLSRVFETDLNTPFKTVFRWEI

SEQ ID NO: 40 - protein, 338 aa, Kandleria vitulina
MINTVYRLIAPKSIRADFVDLKLDEERIIIRPTYLSICAADQRYYTGSRGRVVMKQKLPMALIHEAVGEVVYDPKGELPVGTHVVMIPNTPNEKDDIIKENYLRSSQFRASGFDGFMQNVVSMRRDLVIPFDYEPEVGVLLELMSVGMNAVSTFKKHAHDRKDAIGIWGNGNVGFVTALILRKEFPDAKIYVFGVEEHKNRYFSFADDTFIINDIPEDLQLDHAFECVGGRGSEAAISQIIDYIKPQGTINLMGVSENPVPINTRMVLEKGLQLLGNSRSNYDDFKKSVDMMANNKDVREYLSTIVSEMVVVNTIDDMIRAFEDDTYNDFKTVMKWEI

SEQ ID NO: 41 - protein, 341 aa, Lactiplantibacillus plantarum
MLNQVYRLVSPRQFEVETVAEEVDADDLIVRPKFLSICHADTRYFFGQRSQAALRAKLPMALIHEAVGEVVYDPRNEYKPGTLVAMVPNTPVKKDSIIQENYLPSSRFRSSGYDGFMQEYVCLRRDRAITVPSDFDPHMAAFIEMVSVGVQALTKLESTMDEDQRVIGIWGDGNLGYITATLVKQIFPDSQLLVFGRHQSKLDYFSFADKTYLVDDIPADVKVSQALECTGGQGSEAAIQQIIQHIQPMGTAILMGVSENPVGIDTRSVLAEGLTLRGVSRSSREDFKRAVDILSSSPVTRERLQNLVGYVQKVSSIQDITNFFDSALTNYWGKEVMEWDV

SEQ ID NO: 42 - protein, 342 aa, unidentified
  source 1..342: note = Lachnospiraceae bacterium
MINTLYKLTAPLIVESFYENIDCHSDNIIVRPEKLSICKADIRYYFGMRNAKVLKEKLPLALIHEACGSVVYDITGKFKAGDQVVMLPNIPGINMQYHENYRRDSLFRSSGADGFMQELVSIPQSQVIKFEKMDQNIAAFTEFISVAIHAVSSYLDRSAGKRNGIKRKIGVWGSGAMGYAVSCVLKYFIPSAEITVIGGSKAKLDMFSFVNHTCSLSELPDDAEFDDCFECVGGAQSGNAINQIIDHILPEGLLLLLGVSEEAVPVNTRMVLEKGITLLGRSRSERSDFIKTIDILDTNENIRRRISNLISGEVEINEVNDIHKAFNQSKIADYKIILNWRI

SEQ ID NO: 43 - DNA, 1599 bp, synthetic construct
  source 1..1599: mol_type = other DNA
cttaaacacggcaagggtagcgttgcaaacgacgtaaccgacgaaatggtccgtctgaattggctaactgagttcatgccactccccaccatcaagcacttcatccgtacacctgacgatgcgtggctgttgactacggccatccccggtaagaccgcttttcaggtcctcgaggaataccctgactcgggcgagaacatcgtggatgccttggctgtgtttttgcgccgccttcactctattccggtctgcaactgccctttcaacagcgaccgtgtttttaggcttgcccaggcacaatcacgcatgaacaatggtctagtcgacgctagtgatttcgatgacgagcgcaacggctggccggtggaacaagtgtggaaagagatgcataagctcctgcccttttccccagactctgtcgtgacgcatggtgatttctcgcttgacaacctcatctttgacgagggcaagctcattggctgcattgacgtcggccgggttggcatcgccgatcgctaccaagatcttgcgatcctctggaattgtctgggcgagttctcccctagcctccagaagcgtctgttccagaaatatgggatcgataacccagacatgaacaagctccagttccatttgatgctggatgaatttttctaatggtgttcaccactgttgcttcccctttgttggagcgtccgtcgttctgatggcgctctgagcccaaaatatcccttcttcgcccgagagcaagcctcggagtgtgcttgcaatctacttttcctactaaagttatcttcttgtggcttctgaatttgaatagaacgtgttcagacttgttagctaaatttgttgatgcgagatacttgacagaatcccgttgatgaactcatctgtgtgaccaccgcctggtgatggaatctcgcgcggaagccgtggtgttactgactctcaagcaattcagtagataaatttgtataacatcattgcaaggggtgctagcaatcaattgtccaataccaaacggcggcaagtgcaaaggggcgatagagagtttctgcgaggaagggaaggaatccgtatgcctgaaaacttttgtacaagtgtctttgtaagggcgaggtctgctctgacatctctctgagatctgagatctgatacctgcaggataacttcgtataatgtatgctatacgaagttataaccagatcgaagctcaccccttgttgcaacaagacgagttggttgctcaccataagagcaagaacattgtcatcactgcttacagtcccttgggcaacaatgtcgctggtaaaccacctctgactgagaaccccggtattgtggatgctgctaagcgtttgaaccatactcctgctgctgtgctcattgcttggggtattcaacgcgggtacagcgtcttggtcaagtcagttacaccctcacggatcaagagtaactttgaacagatcactctgtctgatgaggaattccaacgggttaccaacctcatcaaggagtacggtgagagccgtaacaacgttcctttcaattacaagccttcgtggtccattgacgtctttggtacccaggacgaggcta

SEQ ID NO: 44 - DNA, 4618 bp, synthetic construct
  source 1..4618: mol_type = other DNA
tgcagagccttgcaaatgatgaaagaccaatggaattgatcattgattattgatgatgcatgatgaaagagatagaaacagatgcaagatgggatggcgcgatgatcaaatgataatgaacgttcaacccttcaaaattgaaactctcaggctgagcggctgagcaagctctgagaatgtgggtcttcgaagactttcgcttgagcatggtgcatgtgcaaagagatggaatgtggaattgttgtaggtaggaacacagcccggtagagcggcgcagtggctcagcgaagctgggagaacgactgaaccggtcttgagattcatcatctcagcgtgcgtcagcgcgtcagcttcagcgtttgagaatggcacggactgacctgtcgtacatcccaaggaggcccgtgcgctatactcgccttgtggcctaatctgcgatcaacccatcctcaacgaaagcgcaagtagcgactaagcacactatctttcgggtcggtgcggtcacagtatcggcatctctgtctttagctacgatggtgtgcgtgtaactgatcagtacacccgctgtatcaaaactctatcttcaatccgctaagaatcgtcaccatcagtacatcagtacatcagtgggctaagatctaatggtgtcgttcgacggccgcgggcactagccacgagccaagagcggtacagttgctgcgaaatggtgggcagcctgacaggttcagtttgaataggatgaaaacgccatgaagaacagagaagctggcaattgacgatagtggggcgagcgcacgctgcttgctggtccgagcgtaggacgaacgacaaaccatgggcggggccaccaggccccagggagggcgtcactggttggatgtcgtctgttaggctagagctcaggcgctcagggcctctggcccaagcctcggacgcaagcctctgacgagcgagcgcgcgctggggcgggtctgcgcaggaacggcaggactgccgagttggttgaatattgaatggttggatgattggtttgctgggtttggttttgacacgcacggcacaggacaagtgagtttggaggttggatttgcgcaggtagaaagggcgctcggcctcagggcctcagcgtcagcagacgagctcgccagtccaggtcagtacccagtgttcgttacttcccaccgtccagagtttgctgctgcctctcagcttgattcgtgtcggagaagtagaaatggtcacagcgtaccacacactgtccccatgcctgcgtcctgctccacgagtgtttagccacaaaaatttatggacaaccttactgagcctgtgctggggggtgctttagcaccagcactggcgccatggcgtcaaggttaattccactgtcattcgacaaccttcaactgatgggggcaactgggcacaaaaccttggatatataaccaactccaactcccacggttttttaccttttgctcttctccccaggactcactacttctactcctctattcatcttcaccaaaatgtgagacctaatatcactgctgtacagacaagactgtgtatattaggtctcaatgaaagccctcgttttggacgaatacaatcaattgaattaccgtgatttccccgagcccgaaatccactccggagaggtgctgatcgagatcaaggcgtgcggtatttgtggctctgatgtgcacggtatggacggatcgaccggacgtcgaaaaccaccgctggttatgggtcacgaagcctctggcgtcattatcgaaaccggtagcgatgttaagaactggaaaacaggtgaccgagtcacgtttgatagcaccgtgtacccacttaatgactggttcactctgaaaggccactacaacctcagcaacaatcgacaagtgttgggagtgtctcctggcgagtatcgccgtcatggtgcgtttgccgaacgacttgcggttccgcaacatatcctgcaccgaatcccagagaacgttagcttcgtggaggctgcgatggttgagcccatcgctgtggcagctcacgcggtgaatgtttctggattgaagccgggcaattcggctatggttgcgggcgcgggcatggtcggagtgtttgttgtccaactgctgaagctttttggagctaaccctgttgtggttattgacatcgatcacaagaaactgaagcttgctcacgaattcggtgctgactttacattcaatcctaaagaaaaggatattgacgaacgaatcttgcaactcacaaaatcgcgcggttttgaccttacatttgaagtcgtcggcatcaccgagacggtccagacctgcattaccaacacacgtaagggtggcacggtggttcttgttggaaacttgtcccccgaaatccaatttcccctgcaaaaagtcgttacttctgaaatcactgtgcagggctcttgtgccatcaagggtgaatacgagctggcactggacctcttggccgcaaagaaggttgacgtctcgaaactcgtttcggctgttgcaccgctgtctgagggagcggaatggtttaagcgactttacgagaaggaaccgggattgaataaagtgatcctcattccagataagtaacacggatcaacaaaaatgtgcgccagctttgttgtgtgcccttttcctctagcggatcctatccacatttcgtgaatgaaccgattaagctctgacgagatttccttgttttctgtagatacctcttgtagaggtgtcaaagttatgttgtgatcgagagagttacctgcaaggtattatgcaagcggcttgatgaggacactcaactacgtgtgagtaggagtgcgttgctcagcagttgacgcgtgagccgcttgagcagcttgataaaggtcctaatcgtcttccagctgttggcagacgacaatgtgctgtagtagtaggataggcccgtaaaagtgtagaagcaataggttgagactgactgtaatgggtacttgcgttcaaagactgaaagtccaaaggattgctcaaaggcccctgaggtctgagcctctgagcgcgctcttcgtcaaaattcgccggggccatcggtcatcctctcgagggcagcatcttcctgcttgaagactgagtccgtctcagataacttcgtataatgtatgctatacgaagttatcctgcaggagctcagaccttgcatgttagccttgaccttgcctctatgaccactaattcgcacaagattgcacgttaccattgtcatcttgccatgtatccaatgtttcctgtttgccatagtacgtagtagatacatcgatcatcgatgcagatgacgcagatggcattggttcgctttgccctatgcatgcatcatgcatcatgcatcatgcgtcatgcgtcactatccatattaatcattgccctctgtactaggccatgacacctgcagacccttccccagggatgcttcttgtaatagccaatatactacacaactttaccgattacgatcgagatcgatctcactatagtttgtcgaacttcgatgcacatcgagggtgcggaaaaaagctgacggaagcggaagtgggtgaattggttaatttagttagattggcagggttgttcccaagattcaacgcaagctgagaaagaaaacagaaacacgaggcataaggccagtcagaaaatgcattacgaggggagttgaagtgactgtgggccagtgcctgggtcgtcatgtgcaaattttttcttcggttagactgccgcagcatgcagcaactctgccggccctatataactagtgcttcatcttcttgtcattcttgtctctttaccaacacaccggtactctttcaccatgggtaaggaaaagacacacgtatcgcgaccccgactcaactccaacatggacgcagacctgtacggatacaaatgggctcgagataatgtcggacagtcgggtgcgacgatctacagactctatggaaaaccggacgcccccgagctctttcttaaacacggcaagggtagcgttgcaaacgacgtaaccgacgaaatggtccgtctgaattggctaactgagttcatgccactccccaccatcaagcacttcatccgtacacctgacgatgcgtggctgttgactacggccatccccggtaagaccgcttttcaggtcctcgaggaataccctgactcgggcgagaacatcgtggatgccttggctgtgtttttgcgccgccttcactctattccggtctgcaactgccctttcaacagcgaccgtgtttttaggcttgcccaggcacaatcacgcatgaacaatggtctagtcgacgctagtgatttcgatgacgagcgcaacggctggccggtggaacaagtgtggaaagagatgcataagctcctgcccttttccccagactctgtcgtgacgcatggtgatttctcgcttgacaacctcatctttgacgagggcaagctcattggctgcattgacgtcggccgggttggcatcgccgatcgctaccaagatcttgcgatcctctggaattgtctgggcgagttctcccctagcctccagaagcgtctgttccagaaatatgggatcg

SEQ ID NO: 45 - DNA, 4558 bp, synthetic construct
  source 1..4558: mol_type = other DNA
tgcagagccttgcaaatgatgaaagaccaatggaattgatcattgattattgatgatgcatgatgaaagagatagaaacagatgcaagatgggatggcgcgatgatcaaatgataatgaacgttcaacccttcaaaattgaaactctcaggctgagcggctgagcaagctctgagaatgtgggtcttcgaagactttcgcttgagcatggtgcatgtgcaaagagatggaatgtggaattgttgtaggtaggaacacagcccggtagagcggcgcagtggctcagcgaagctgggagaacgactgaaccggtcttgagattcatcatctcagcgtgcgtcagcgcgtcagcttcagcgtttgagaatggcacggactgacctgtcgtacatcccaaggaggcccgtgcgctatactcgccttgtggcctaatctgcgatcaacccatcctcaacgaaagcgcaagtagcgactaagcacactatctttcgggtcggtgcggtcacagtatcggcatctctgtctttagctacgatggtgtgcgtgtaactgatcagtacacccgctgtatcaaaactctatcttcaatccgctaagaatcgtcaccatcagtacatcagtacatcagtgggctaagatctaatggtgtcgttcgacggccgcgggcactagccacgagccaagagcggtacagttgctgcgaaatggtgggcagcctgacaggttcagtttgaataggatgaaaacgccatgaagaacagagaagctggcaattgacgatagtggggcgagcgcacgctgcttgctggtccgagcgtaggacgaacgacaaaccatgggcggggccaccaggccccagggagggcgtcactggttggatgtcgtctgttaggctagagctcaggcgctcagggcctctggcccaagcctcggacgcaagcctctgacgagcgagcgcgcgctggggcgggtctgcgcaggaacggcaggactgccgagttggttgaatattgaatggttggatgattggtttgctgggtttggttttgacacgcacggcacaggacaagtgagtttggaggttggatttgcgcaggtagaaagggcgctcggcctcagggcctcagcgtcagcagacgagctcgccagtccaggtcagtacccagtgttcgttacttcccaccgtccagagtttgctgctgcctctcagcttgattcgtgtcggagaagtagaaatggtcacagcgtaccacacactgtccccatgcctgcgtcctgctccacgagtgtttagccacaaaaatttatggacaaccttactgagcctgtgctggggggtgctttagcaccagcactggcgccatggcgtcaaggttaattccactgtcattcgacaaccttcaactgatgggggcaactgggcacaaaaccttggatatataaccaactccaactcccacggttttttaccttttgctcttctccccaggactcactacttctactcctctattcatcttcaccaaaatgtgagacctaatatcactgctgtacagacaagactgtgtatattaggtctcaatgaaagctatggtgtggcttggacccgaacgaatggaagtgcgagatcttcctgcgccgcgaccgggtgcaggtgaagtgctggttcagacggaagctgctggaatttgtggctctgaagtggaggcctatttgggtcgcatggctaatcgaacaccgccgttggtgatgggtcacgaatatgctggacttgtcaccgaggtcggagagggagtcgaccgcgtctggtcccgtcgacgcgttgcggttaacccgattgttggttgcggtcgttgtcgaaactgcgccgccggtgatcgaaacttgtgtcctgatcgtcaccttcttggcattgcagcgccaggaggattcgcagcgttctcggtggttcccgaacgatgcctcttttctctgcctgaaggaatggatgcgcgactgggcgcgctcaccaagccattggccaacggtgtgcatcttattcgcaaaagcggcgcgggacgaggccgagttgtggttatcggcgcgggaactattggactcggatgtttgcaagctgctttgttgcacggtgctgagcaagttgacgtcgttgaacgccatccgggacgacgccgtcacgcacttgccctgggagcacgccaggcggtggcggaattggcagatgtcgaacctggtgctgatcttgtggttgatgccgcaggatccgaagcgacacgccgcgcggccgtggaattggttggcccggcgggaacggcctcttttgttggactccactccgacgaaactgtcctgccttggcatcgcattatccgagccaatattcgagttcaaggaacatttggctacgcagatcgtgatttccagcaagctcttgactggttggcagcgggaaaggcagccattccattgtctgaactccgccccttggacgatggcccagcggccttcgagcgccttgctcgtggaccgatcgacgaaatcaaagtctttttggcttaacacggatcaacaaaaatgtgcgccagctttgttgtgtgcccttttcctctagcggatcctatccacatttcgtgaatgaaccgattaagctctgacgagatttccttgttttctgtagatacctcttgtagaggtgtcaaagttatgttgtgatcgagagagttacctgcaaggtattatgcaagcggcttgatgaggacactcaactacgtgtgagtaggagtgcgttgctcagcagttgacgcgtgagccgcttgagcagcttgataaaggtcctaatcgtcttccagctgttggcagacgacaatgtgctgtagtagtaggataggcccgtaaaagtgtagaagcaataggttgagactgactgtaatgggtacttgcgttcaaagactgaaagtccaaaggattgctcaaaggcccctgaggtctgagcctctgagcgcgctcttcgtcaaaattcgccggggccatcggtcatcctctcgagggcagcatcttcctgcttgaagactgagtccgtctcagataacttcgtataatgtatgctatacgaagttatcctgcaggagctcagaccttgcatgttagccttgaccttgcctctatgaccactaattcgcacaagattgcacgttaccattgtcatcttgccatgtatccaatgtttcctgtttgccatagtacgtagtagatacatcgatcatcgatgcagatgacgcagatggcattggttcgctttgccctatgcatgcatcatgcatcatgcatcatgcgtcatgcgtcactatccatattaatcattgccctctgtactaggccatgacacctgcagacccttccccagggatgcttcttgtaatagccaatatactacacaactttaccgattacgatcgagatcgatctcactatagtttgtcgaacttcgatgcacatcgagggtgcggaaaaaagctgacggaagcggaagtgggtgaattggttaatttagttagattggcagggttgttcccaagattcaacgcaagctgagaaagaaaacagaaacacgaggcataaggccagtcagaaaatgcattacgaggggagttgaagtgactgtgggccagtgcctgggtcgtcatgtgcaaattttttcttcggttagactgccgcagcatgcagcaactctgccggccctatataactagtgcttcatcttcttgtcattcttgtctctttaccaacacaccggtactctttcaccatgggtaaggaaaagacacacgtatcgcgaccccgactcaactccaacatggacgcagacctgtacggatacaaatgggctcgagataatgtcggacagtcgggtgcgacgatctacagactctatggaaaaccggacgcccccgagctctttcttaaacacggcaagggtagcgttgcaaacgacgtaaccgacgaaatggtccgtctgaattggctaactgagttcatgccactccccaccatcaagcacttcatccgtacacctgacgatgcgtggctgttgactacggccatccccggtaagaccgcttttcaggtcctcgaggaataccctgactcgggcgagaacatcgtggatgccttggctgtgtttttgcgccgccttcactctattccggtctgcaactgccctttcaacagcgaccgtgtttttaggcttgcccaggcacaatcacgcatgaacaatggtctagtcgacgctagtgatttcgatgacgagcgcaacggctggccggtggaacaagtgtggaaagagatgcataagctcctgcccttttccccagactctgtcgtgacgcatggtgatttctcgcttgacaacctcatctttgacgagggcaagctcattggctgcattgacgtcggccgggttggcatcgccgatcgctaccaagatcttgcgatcctctggaattgtctgggcgagttctcccctagcctccagaagcgtctgttccagaaatatgggatcg

SEQ ID NO: 46 - DNA, 4594 bp, synthetic construct
  source 1..4594: mol_type = other DNA
tgcagagccttgcaaatgatgaaagaccaatggaattgatcattgattattgatgatgcatgatgaaagagatagaaacagatgcaagatgggatggcgcgatgatcaaatgataatgaacgttcaacccttcaaaattgaaactctcaggctgagcggctgagcaagctctgagaatgtgggtcttcgaagactttcgcttgagcatggtgcatgtgcaaagagatggaatgtggaattgttgtaggtaggaacacagcccggtagagcggcgcagtggctcagcgaagctgggagaacgactgaaccggtcttgagattcatcatctcagcgtgcgtcagcgcgtcagcttcagcgtttgagaatggcacggactgacctgtcgtacatcccaaggaggcccgtgcgctatactcgccttgtggcctaatctgcgatcaacccatcctcaacgaaagcgcaagtagcgactaagcacactatctttcgggtcggtgcggtcacagtatcggcatctctgtctttagctacgatggtgtgcgtgtaactgatcagtacacccgctgtatcaaaactctatcttcaatccgctaagaatcgtcaccatcagtacatcagtacatcagtgggctaagatctaatggtgtcgttcgacggccgcgggcactagccacgagccaagagcggtacagttgctgcgaaatggtgggcagcctgacaggttcagtttgaataggatgaaaacgccatgaagaacagagaagctggcaattgacgatagtggggcgagcgcacgctgcttgctggtccgagcgtaggacgaacgacaaaccatgggcggggccaccaggccccagggagggcgtcactggttggatgtcgtctgttaggctagagctcaggcgctcagggcctctggcccaagcctcggacgcaagcctctgacgagcgagcgcgcgctggggcgggtctgcgcaggaacggcaggactgccgagttggttgaatattgaatggttggatgattggtttgctgggtttggttttgacacgcacggcacaggacaagtgagtttggaggttggatttgcgcaggtagaaagggcgctcggcctcagggcctcagcgtcagcagacgagctcgccagtccaggtcagtacccagtgttcgttacttcccaccgtccagagtttgctgctgcctctcagcttgattcgtgtcggagaagtagaaatggtcacagcgtaccacacactgtccccatgcctgcgtcctgctccacgagtgtttagccacaaaaatttatggacaaccttactgagcctgtgctggggggtgctttagcaccagcactggcgccatggcgtcaaggttaattccactgtcattcgacaaccttcaactgatgggggcaactgggcacaaaaccttggatatataaccaactccaactcccacggttttttaccttttgctcttctccccaggactcactacttctactcctctattcatcttcaccaaaatgtgagacctaatatcactgctgtacagacaagactgtgtatattaggtctcaatgaagtcgttgatttactatggcccgcacgatctgcgatatggagattctcctaagccaaagatccgatctggagaagtcctcctccgaatcaaaagcgtcggtatctgcggcactgacctccacatctataacggaggcatgaaaaatctgccgttgcctctgattatgggtcacgagttcagcggagttattgaagagcttgcccgagacgtgaagaactttaaggttggagatcgagtgatcgctgaacacgttatcaattgtggaaaatgttcgtattgtcttagcggcaagccgaatctgtgtgctaactctcgcattattggagttcaccgccccggagcgctcgccgaatacttggctgttcccgcggacctggtgtacaagatcccggcgaaactgtcttttgaagagggcgcaatgatcgaacccctttctatcgcctattatgccgtgaagcaagctcgtagcatcctgggtaaaaaggtggcggtcatcggccaaggacccatcggcctgctgcttgaccaaatcctccgcgacgcaggcgctgaagtcattggcattgacatcgcagattggcgattgaaactcgcgaagaaaaagaagtgggcagatcatacaatcaactccagccagaaaacctggctcaagaagatccagaagatcgcaccagaaggcgtggacacagtgtttgaggttgttggccgtgaggaaactgccgagatggctattgaaatcgcgcgtcgagatggtgacgtttttatcctcggtgtctttgaaagcgccgcatctttgaacatgatgaatattgttaagaaggaactcaacgtgttcggaagctggacctgtgcgttttctttccccccttcgattgctctcgccgttgccaagaaagttgatttgaaatccttgatcacgaatcgatatgacgtgaaggacggtgccctggcatttaaggagtctgcctcttataaaggtaagcgaatcaagactgttatcaacttttaacacggatcaacaaaaatgtgcgccagctttgttgtgtgcccttttcctctagcggatcctatccacatttcgtgaatgaaccgattaagctctgacgagatttccttgttttctgtagatacctcttgtagaggtgtcaaagttatgttgtgatcgagagagttacctgcaaggtattatgcaagcggcttgatgaggacactcaactacgtgtgagtaggagtgcgttgctcagcagttgacgcgtgagccgcttgagcagcttgataaaggtcctaatcgtcttccagctgttggcagacgacaatgtgctgtagtagtaggataggcccgtaaaagtgtagaagcaataggttgagactgactgtaatgggtacttgcgttcaaagactgaaagtccaaaggattgctcaaaggcccctgaggtctgagcctctgagcgcgctcttcgtcaaaattcgccggggccatcggtcatcctctcgagggcagcatcttcctgcttgaagactgagtccgtctcagataacttcgtataatgtatgctatacgaagttatcctgcaggagctcagaccttgcatgttagccttgaccttgcctctatgaccactaattcgcacaagattgcacgttaccattgtcatcttgccatgtatccaatgtttcctgtttgccatagtacgtagtagatacatcgatcatcgatgcagatgacgcagatggcattggttcgctttgccctatgcatgcatcatgcatcatgcatcatgcgtcatgcgtcactatccatattaatcattgccctctgtactaggccatgacacctgcagacccttccccagggatgcttcttgtaatagccaatatactacacaactttaccgattacgatcgagatcgatctcactatagtttgtcgaacttcgatgcacatcgagggtgcggaaaaaagctgacggaagcggaagtgggtgaattggttaatttagttagattggcagggttgttcccaagattcaacgcaagctgagaaagaaaacagaaacacgaggcataaggccagtcagaaaatgcattacgaggggagttgaagtgactgtgggccagtgcctgggtcgtcatgtgcaaattttttcttcggttagactgccgcagcatgcagcaactctgccggccctatataactagtgcttcatcttcttgtcattcttgtctctttaccaacacaccggtactctttcaccatgggtaaggaaaagacacacgtatcgcgaccccgactcaactccaacatggacgcagacctgtacggatacaaatgggctcgagataatgtcggacagtcgggtgcgacgatctacagactctatggaaaaccggacgcccccgagctctttcttaaacacggcaagggtagcgttgcaaacgacgtaaccgacgaaatggtccgtctgaattggctaactgagttcatgccactccccaccatcaagcacttcatccgtacacctgacgatgcgtggctgttgactacggccatccccggtaagaccgcttttcaggtcctcgaggaataccctgactcgggcgagaacatcgtggatgccttggctgtgtttttgcgccgccttcactctattccggtctgcaactgccctttcaacagcgaccgtgtttttaggcttgcccaggcacaatcacgcatgaacaatggtctagtcgacgctagtgatttcgatgacgagcgcaacggctggccggtggaacaagtgtggaaagagatgcataagctcctgcccttttccccagactctgtcgtgacgcatggtgatttctcgcttgacaacctcatctttgacgagggcaagctcattggctgcattgacgtcggccgggttggcatcgccgatcgctaccaagatcttgcgatcctctggaattgtctgggcgagttctcccctagcctccagaagcgtctgttccagaaatatgggatcg

SEQ ID NO: 47 - DNA, 4624 bp, synthetic construct
  source 1..4624: mol_type = other DNA
tgcagagccttgcaaatgatgaaagaccaatggaattgatcattgattattgatgatgcatgatgaaagagatagaaacagatgcaagatgggatggcgcgatgatcaaatgataatgaacgttcaacccttcaaaattgaaactctcaggctgagcggctgagcaagctctgagaatgtgggtcttcgaagactttcgcttgagcatggtgcatgtgcaaagagatggaatgtggaattgttgtaggtaggaacacagcccggtagagcggcgcagtggctcagcgaagctgggagaacgactgaaccggtcttgagattcatcatctcagcgtgcgtcagcgcgtcagcttcagcgtttgagaatggcacggactgacctgtcgtacatcccaaggaggcccgtgcgctatactcgccttgtggcctaatctgcgatcaacccatcctcaacgaaagcgcaagtagcgactaagcacactatctttcgggtcggtgcggtcacagtatcggcatctctgtctttagctacgatggtgtgcgtgtaactgatcagtacacccgctgtatcaaaactctatcttcaatccgctaagaatcgtcaccatcagtacatcagtacatcagtgggctaagatctaatggtgtcgttcgacggccgcgggcactagccacgagccaagagcggtacagttgctgcgaaatggtgggcagcctgacaggttcagtttgaataggatgaaaacgccatgaagaacagagaagctggcaattgacgatagtggggcgagcgcacgctgcttgctggtccgagcgtaggacgaacgacaaaccatgggcggggccaccaggccccagggagggcgtcactggttggatgtcgtctgttaggctagagctcaggcgctcagggcctctggcccaagcctcggacgcaagcctctgacgagcgagcgcgcgctggggcgggtctgcgcaggaacggcaggactgccgagttggttgaatattgaatggttggatgattggtttgctgggtttggttttgacacgcacggcacaggacaagtgagtttggaggttggatttgcgcaggtagaaagggcgctcggcctcagggcctcagcgtcagcagacgagctcgccagtccaggtcagtacccagtgttcgttacttcccaccgtccagagtttgctgctgcctctcagcttgattcgtgtcggagaagtagaaatggtcacagcgtaccacacactgtccccatgcctgcgtcctgctccacgagtgtttagccacaaaaatttatggacaaccttactgagcctgtgctggggggtgctttagcaccagcactggcgccatggcgtcaaggttaattccactgtcattcgacaaccttcaactgatgggggcaactgggcacaaaaccttggatatataaccaactccaactcccacggttttttaccttttgctcttctccccaggactcactacttctactcctctattcatcttcaccaaaatgtgagacctaatatcactgctgtacagacaagactgtgtatattaggtctcaatgaaggcaatgttgcttagccagtatcgacgactggaaattgccgagttgccgacaccgatccctggtcgtggcgaactcttgatccatgtcgcggcatgtggtatttgcggaagcgatgtgcacggatacgatggcagcagcggacgacgtatccctccaatcgtgatgggccatgaggctgcaggacgtgttgcggcactcggtccgcaggtcacgggctggtcggaaggtgatcgcgtcacattcgatagcaccatctcctgcggcacttgcccttactgctcccgcggcgagattaacctctgcgaccgtcgtcaagtgcttggagtttcgtgcggtgactatcgttgcgctggagcttttgcggagtatgttattgtgccgcaacgcattgcttataaattgccggatgccttgagcttctcggaggccgcaactttggaagcggtcgcggttgctgtgcacgctgttagcctttcccaggtttcgccaggtactcaggcactggttattggcgctggtatgattggcctcctcaccttgcaagcgctgcgcgcagccggttgcagctccgtggtgatcgcggacgttgatgcgtcccgtctgcgtttggctaaagaggttggcgcaaccgaaacgcttaatgcgacaggagatgaatttgttgccgaaatcttcaaacgcacaaacggagcgggcacagaccttgccgtcgaagctgtcggtatcgatgctaccgtccgaacggccattaactctgtccgaaaaggcggtacagttaccctggtcggcaatatcacgccggaggtcactcttccgcttcagaaggtggtgacacgccagattcgaatccaaggttcttgcgcatccgctggtgaatacccccgagctatccagctccttacgtctggcgctattaaagtcaaacctctcattaccgctgtggccccgcttgaagacggtcctcagtggtttgagcgcctttacagccgcgagcctaatcttatgaaggtggtccttaccccgggcagcgtgtcttaacacggatcaacaaaaatgtgcgccagctttgttgtgtgcccttttcctctagcggatcctatccacatttcgtgaatgaaccgattaagctctgacgagatttccttgttttctgtagatacctcttgtagaggtgtcaaagttatgttgtgatcgagagagttacctgcaaggtattatgcaagcggcttgatgaggacactcaactacgtgtgagtaggagtgcgttgctcagcagttgacgcgtgagccgcttgagcagcttgataaaggtcctaatcgtcttccagctgttggcagacgacaatgtgctgtagtagtaggataggcccgtaaaagtgtagaagcaataggttgagactgactgtaatgggtacttgcgttcaaagactgaaagtccaaaggattgctcaaaggcccctgaggtctgagcctctgagcgcgctcttcgtcaaaattcgccggggccatcggtcatcctctcgagggcagcatcttcctgcttgaagactgagtccgtctcagataacttcgtataatgtatgctatacgaagttatcctgcaggagctcagaccttgcatgttagccttgaccttgcctctatgaccactaattcgcacaagattgcacgttaccattgtcatcttgccatgtatccaatgtttcctgtttgccatagtacgtagtagatacatcgatcatcgatgcagatgacgcagatggcattggttcgctttgccctatgcatgcatcatgcatcatgcatcatgcgtcatgcgtcactatccatattaatcattgccctctgtactaggccatgacacctgcagacccttccccagggatgcttcttgtaatagccaatatactacacaactttaccgattacgatcgagatcgatctcactatagtttgtcgaacttcgatgcacatcgagggtgcggaaaaaagctgacggaagcggaagtgggtgaattggttaatttagttagattggcagggttgttcccaagattcaacgcaagctgagaaagaaaacagaaacacgaggcataaggccagtcagaaaatgcattacgaggggagttgaagtgactgtgggccagtgcctgggtcgtcatgtgcaaattttttcttcggttagactgccgcagcatgcagcaactctgccggccctatataactagtgcttcatcttcttgtcattcttgtctctttaccaacacaccggtactctttcaccatgggtaaggaaaagacacacgtatcgcgaccccgactcaactccaacatggacgcagacctgtacggatacaaatgggctcgagataatgtcggacagtcgggtgcgacgatctacagactctatggaaaaccggacgcccccgagctctttcttaaacacggcaagggtagcgttgcaaacgacgtaaccgacgaaatggtccgtctgaattggctaactgagttcatgccactccccaccatcaagcacttcatccgtacacctgacgatgcgtggctgttgactacggccatccccggtaagaccgcttttcaggtcctcgaggaataccctgactcgggcgagaacatcgtggatgccttggctgtgtttttgcgccgccttcactctattccggtctgcaactgccctttcaacagcgaccgtgtttttaggcttgcccaggcacaatcacgcatgaacaatggtctagtcgacgctagtgatttcgatgacgagcgcaacggctggccggtggaacaagtgtggaaagagatgcataagctcctgcccttttccccagactctgtcgtgacgcatggtgatttctcgcttgacaacctcatctttgacgagggcaagctcattggctgcattgacgtcggccgggttggcatcgccgatcgctaccaagatcttgcgatcctctggaattgtctgggcgagttctcccctagcctccagaagcgtctgttccagaaatatgggatcg

SEQ ID NO: 48 - DNA, 4615 bp, synthetic construct
  source 1..4615: mol_type = other DNA
tgcagagccttgcaaatgatgaaagaccaatggaattgatcattgattattgatgatgcatgatgaaagagatagaaacagatgcaagatgggatggcgcgatgatcaaatgataatgaacgttcaacccttcaaaattgaaactctcaggctgagcggctgagcaagctctgagaatgtgggtcttcgaagactttcgcttgagcatggtgcatgtgcaaagagatggaatgtggaattgttgtaggtaggaacacagcccggtagagcggcgcagtggctcagcgaagctgggagaacgactgaaccggtcttgagattcatcatctcagcgtgcgtcagcgcgtcagcttcagcgtttgagaatggcacggactgacctgtcgtacatcccaaggaggcccgtgcgctatactcgccttgtggcctaatctgcgatcaacccatcctcaacgaaagcgcaagtagcgactaagcacactatctttcgggtcggtgcggtcacagtatcggcatctctgtctttagctacgatggtgtgcgtgtaactgatcagtacacccgctgtatcaaaactctatcttcaatccgctaagaatcgtcaccatcagtacatcagtacatcagtgggctaagatctaatggtgtcgttcgacggccgcgggcactagccacgagccaagagcggtacagttgctgcgaaatggtgggcagcctgacaggttcagtttgaataggatgaaaacgccatgaagaacagagaagctggcaattgacgatagtggggcgagcgcacgctgcttgctggtccgagcgtaggacgaacgacaaaccatgggcggggccaccaggccccagggagggcgtcactggttggatgtcgtctgttaggctagagctcaggcgctcagggcctctggcccaagcctcggacgcaagcctctgacgagcgagcgcgcgctggggcgggtctgcgcaggaacggcaggactgccgagttggttgaatattgaatggttggatgattggtttgctgggtttggttttgacacgcacggcacaggacaagtgagtttggaggttggatttgcgcaggtagaaagggcgctcggcctcagggcctcagcgtcagcagacgagctcgccagtccaggtcagtacccagtgttcgttacttcccaccgtccagagtttgctgctgcctctcagcttgattcgtgtcggagaagtagaaatggtcacagcgtaccacacactgtccccatgcctgcgtcctgctccacgagtgtttagccacaaaaatttatggacaaccttactgagcctgtgctggggggtgctttagcaccagcactggcgccatggcgtcaaggttaattccactgtcattcgacaaccttcaactgatgggggcaactgggcacaaaaccttggatatataaccaactccaactcccacggttttttaccttttgctcttctccccaggactcactacttctactcctctattcatcttcaccaaaatgtgagacctaatatcactgctgtacagacaagactgtgtatattaggtctcaatgaaagcgatggtgttgaaagaatataagtatctggaaatcgaagacattcctattccgcacatcgaagcagcggacgaactgttggtccgcgtgaaggctaccgccatctgcggttcggatatccatggttttgatggttccaccggacgccgtaaaccgccattggtcatgggacacgaggcatcgggtgttgtcgaaagcgtcggaagcgaagttaaatcgctgaaaatcggtgaccgtgtcaccttcgactccacagtttggtgcggcgaatgctacttttgccgacagggtcaggttaacctgtgcgacaaacgacgtgtgcttggtgtgtcgtgcgacgaataccgcaaggacggtacctttgcggaatatgtcattgtgcccgagcgtattgtgtataagttgccggataatgttgccttcgaagaagcagcattgactgagccggtttctgtcgcgatgcacgcatttgatatcaccggaatgaagccaggagaaaatgcggccgttatcggtagcggtcttatcggactcctcctgattcaaattatccgtgcttattcgccccacttgatcatcgcgttcgatacagacgaaaaacgccgaaaagcagctatcgaagctggagccgatattgcattggacccccaagatcctgagtcgcataaaactgtcctgagcatgactaataaccgaggtgtcgaccgagcatttgaggctgtgggcgcctcggcagcgatcggtacagctattgaatccgtccgaaaaggctcgtccgtcactctgatcggcaatattagcaataaagctgagatcccgctccaatctgtggttacgcgccaaattgcccttttgggttcgtgcgctatttctggagagtatcctgtctctttggctttgatggcgaatcgcactattgacgtgcgtcaagttatctccgcaatcgcccctttggaggagggtcctctgtggttcgaacgcttgtataaacgcgaacctggtcttttgaaggttgttctcacgccgtaacacggatcaacaaaaatgtgcgccagctttgttgtgtgcccttttcctctagcggatcctatccacatttcgtgaatgaaccgattaagctctgacgagatttccttgttttctgtagatacctcttgtagaggtgtcaaagttatgttgtgatcgagagagttacctgcaaggtattatgcaagcggcttgatgaggacactcaactacgtgtgagtaggagtgcgttgctcagcagttgacgcgtgagccgcttgagcagcttgataaaggtcctaatcgtcttccagctgttggcagacgacaatgtgctgtagtagtaggataggcccgtaaaagtgtagaagcaataggttgagactgactgtaatgggtacttgcgttcaaagactgaaagtccaaaggattgctcaaaggcccctgaggtctgagcctctgagcgcgctcttcgtcaaaattcgccggggccatcggtcatcctctcgagggcagcatcttcctgcttgaagactgagtccgtctcagataacttcgtataatgtatgctatacgaagttatcctgcaggagctcagaccttgcatgttagccttgaccttgcctctatgaccactaattcgcacaagattgcacgttaccattgtcatcttgccatgtatccaatgtttcctgtttgccatagtacgtagtagatacatcgatcatcgatgcagatgacgcagatggcattggttcgctttgccctatgcatgcatcatgcatcatgcatcatgcgtcatgcgtcactatccatattaatcattgccctctgtactaggccatgacacctgcagacccttccccagggatgcttcttgtaatagccaatatactacacaactttaccgattacgatcgagatcgatctcactatagtttgtcgaacttcgatgcacatcgagggtgcggaaaaaagctgacggaagcggaagtgggtgaattggttaatttagttagattggcagggttgttcccaagattcaacgcaagctgagaaagaaaacagaaacacgaggcataaggccagtcagaaaatgcattacgaggggagttgaagtgactgtgggccagtgcctgggtcgtcatgtgcaaattttttcttcggttagactgccgcagcatgcagcaactctgccggccctatataactagtgcttcatcttcttgtcattcttgtctctttaccaacacaccggtactctttcaccatgggtaaggaaaagacacacgtatcgcgaccccgactcaactccaacatggacgcagacctgtacggatacaaatgggctcgagataatgtcggacagtcgggtgcgacgatctacagactctatggaaaaccggacgcccccgagctctttcttaaacacggcaagggtagcgttgcaaacgacgtaaccgacgaaatggtccgtctgaattggctaactgagttcatgccactccccaccatcaagcacttcatccgtacacctgacgatgcgtggctgttgactacggccatccccggtaagaccgcttttcaggtcctcgaggaataccctgactcgggcgagaacatcgtggatgccttggctgtgtttttgcgccgccttcactctattccggtctgcaactgccctttcaacagcgaccgtgtttttaggcttgcccaggcacaatcacgcatgaacaatggtctagtcgacgctagtgatttcgatgacgagcgcaacggctggccggtggaacaagtgtggaaagagatgcataagctcctgcccttttccccagactctgtcgtgacgcatggtgatttctcgcttgacaacctcatctttgacgagggcaagctcattggctgcattgacgtcggccgggttggcatcgccgatcgctaccaagatcttgcgatcctctggaattgtctgggcgagttctcccctagcctccagaagcgtctgttccagaaatatgggatcg

SEQ ID NO: 49 - DNA, 4627 bp, synthetic construct
  source 1..4627: mol_type = other DNA
tgcagagccttgcaaatgatgaaagaccaatggaattgatcattgattattgatgatgcatgatgaaagagatagaaacagatgcaagatgggatggcgcgatgatcaaatgataatgaacgttcaacccttcaaaattgaaactctcaggctgagcggctgagcaagctctgagaatgtgggtcttcgaagactttcgcttgagcatggtgcatgtgcaaagagatggaatgtggaattgttgtaggtaggaacacagcccggtagagcggcgcagtggctcagcgaagctgggagaacgactgaaccggtcttgagattcatcatctcagcgtgcgtcagcgcgtcagcttcagcgtttgagaatggcacggactgacctgtcgtacatcccaaggaggcccgtgcgctatactcgccttgtggcctaatctgcgatcaacccatcctcaacgaaagcgcaagtagcgactaagcacactatctttcgggtcggtgcggtcacagtatcggcatctctgtctttagctacgatggtgtgcgtgtaactgatcagtacacccgctgtatcaaaactctatcttcaatccgctaagaatcgtcaccatcagtacatcagtacatcagtgggctaagatctaatggtgtcgttcgacggccgcgggcactagccacgagccaagagcggtacagttgctgcgaaatggtgggcagcctgacaggttcagtttgaataggatgaaaacgccatgaagaacagagaagctggcaattgacgatagtggggcgagcgcacgctgcttgctggtccgagcgtaggacgaacgacaaaccatgggcggggccaccaggccccagggagggcgtcactggttggatgtcgtctgttaggctagagctcaggcgctcagggcctctggcccaagcctcggacgcaagcctctgacgagcgagcgcgcgctggggcgggtctgcgcaggaacggcaggactgccgagttggttgaatattgaatggttggatgattggtttgctgggtttggttttgacacgcacggcacaggacaagtgagtttggaggttggatttgcgcaggtagaaagggcgctcggcctcagggcctcagcgtcagcagacgagctcgccagtccaggtcagtacccagtgttcgttacttcccaccgtccagagtttgctgctgcctctcagcttgattcgtgtcggagaagtagaaatggtcacagcgtaccacacactgtccccatgcctgcgtcctgctccacgagtgtttagccacaaaaatttatggacaaccttactgagcctgtgctggggggtgctttagcaccagcactggcgccatggcgtcaaggttaattccactgtcattcgacaaccttcaactgatgggggcaactgggcacaaaaccttggatatataaccaactccaactcccacggttttttaccttttgctcttctccccaggactcactacttctactcctctattcatcttcaccaaaatgtgagacctaatatcactgctgtacagacaagactgtgtatattaggtctcaatgaaggcactccgcctgtacgctccaggtgacttgcgtttggaggaaatcccaattcctttgccacgtcccgatgaggtgttggttcgcgtgcttgcgtgcggtatctgcggttcggatatcccccgtgtttttgaacacggtacgtataaatacccattggtgccgggccatgagttttccggtattgttgaaaaagtcggctccgaaacgggaaaagattgggttggtcgtcacgttgtcgtctatcccctcatcccgtgtcgacaatgctcctcttgctactctggtctttatacccaatgcctcaactacgactacttgggatctcgccgtgacggaggatttgcagagtatgtgactgtccctgtgaataatattatcccggtccctaatggaatctctggagagatctcggcgatcactgagccatgtgcggtcgcccttcatgccgttcgcaaggcccaagcctgcgtgggtgacacggtccttattacgggagctggaaccattggtatcttgatcgccctctgggcgcgagcagcaggtgccgaagtctttatgactgacattgtggtgggaaagttgaaactggctcgttcgttgggttttcagcatctgctggacgccaaacaaacaaatgtttctgaatgggttaagcaaaagtgtaaacacggagttgatatcgtgttcgaaaccacgggacatcccgcgggactcgaaacgtcgattgactcttgttctattacaggcaaaattattctcgtgggcaatcccagcttcgaagagatgaaagttccggctaaacaatatggaatgattctgcgcaaggagatccagattactggaatttggaattcgctcatcaacgaatatccaaaaaacgagtggcaagttgtgctgcaagagttcaagaaggagtcgtccttgtactcgaagattatcacgcataaggttcccattgagggccttaaggaattgtttgtgacgatttacaacaaacaggtctttccggtgaaggctatgtttatcaataaggagatctaacacggatcaacaaaaatgtgcgccagctttgttgtgtgcccttttcctctagcggatcctatccacatttcgtgaatgaaccgattaagctctgacgagatttccttgttttctgtagatacctcttgtagaggtgtcaaagttatgttgtgatcgagagagttacctgcaaggtattatgcaagcggcttgatgaggacactcaactacgtgtgagtaggagtgcgttgctcagcagttgacgcgtgagccgcttgagcagcttgataaaggtcctaatcgtcttccagctgttggcagacgacaatgtgctgtagtagtaggataggcccgtaaaagtgtagaagcaataggttgagactgactgtaatgggtacttgcgttcaaagactgaaagtccaaaggattgctcaaaggcccctgaggtctgagcctctgagcgcgctcttcgtcaaaattcgccggggccatcggtcatcctctcgagggcagcatcttcctgcttgaagactgagtccgtctcagataacttcgtataatgtatgctatacgaagttatcctgcaggagctcagaccttgcatgttagccttgaccttgcctctatgaccactaattcgcacaagattgcacgttaccattgtcatcttgccatgtatccaatgtttcctgtttgccatagtacgtagtagatacatcgatcatcgatgcagatgacgcagatggcattggttcgctttgccctatgcatgcatcatgcatcatgcatcatgcgtcatgcgtcactatccatattaatcattgccctctgtactaggccatgacacctgcagacccttccccagggatgcttcttgtaatagccaatatactacacaactttaccgattacgatcgagatcgatctcactatagtttgtcgaacttcgatgcacatcgagggtgcggaaaaaagctgacggaagcggaagtgggtgaattggttaatttagttagattggcagggttgttcccaagattcaacgcaagctgagaaagaaaacagaaacacgaggcataaggccagtcagaaaatgcattacgaggggagttgaagtgactgtgggccagtgcctgggtcgtcatgtgcaaattttttcttcggttagactgccgcagcatgcagcaactctgccggccctatataactagtgcttcatcttcttgtcattcttgtctctttaccaacacaccggtactctttcaccatgggtaaggaaaagacacacgtatcgcgaccccgactcaactccaacatggacgcagacctgtacggatacaaatgggctcgagataatgtcggacagtcgggtgcgacgatctacagactctatggaaaaccggacgcccccgagctctttcttaaacacggcaagggtagcgttgcaaacgacgtaaccgacgaaatggtccgtctgaattggctaactgagttcatgccactccccaccatcaagcacttcatccgtacacctgacgatgcgtggctgttgactacggccatccccggtaagaccgcttttcaggtcctcgaggaataccctgactcgggcgagaacatcgtggatgccttggctgtgtttttgcgccgccttcactctattccggtctgcaactgccctttcaacagcgaccgtgtttttaggcttgcccaggcacaatcacgcatgaacaatggtctagtcgacgctagtgatttcgatgacgagcgcaacggctggccggtggaacaagtgtggaaagagatgcataagctcctgcccttttccccagactctgtcgtgacgcatggtgatttctcgcttgacaacctcatctttgacgagggcaagctcattggctgcattgacgtcggccgggttggcatcgccgatcgctaccaagatcttgcgatcctctggaattgtctgggcgagttctcccctagcctccagaagcgtctgttccagaaatatgggatcg

SEQ ID NO: 50 - DNA, 4594 bp, synthetic construct
  source 1..4594: mol_type = other DNA
tgcagagccttgcaaatgatgaaagaccaatggaattgatcattgattattgatgatgcatgatgaaagagatagaaacagatgcaagatgggatggcgcgatgatcaaatgataatgaacgttcaacccttcaaaattgaaactctcaggctgagcggctgagcaagctctgagaatgtgggtcttcgaagactttcgcttgagcatggtgcatgtgcaaagagatggaatgtggaattgttgtaggtaggaacacagcccggtagagcggcgcagtggctcagcgaagctgggagaacgactgaaccggtcttgagattcatcatctcagcgtgcgtcagcgcgtcagcttcagcgtttgagaatggcacggactgacctgtcgtacatcccaaggaggcccgtgcgctatactcgccttgtggcctaatctgcgatcaacccatcctcaacgaaagcgcaagtagcgactaagcacactatctttcgggtcggtgcggtcacagtatcggcatctctgtctttagctacgatggtgtgcgtgtaactgatcagtacacccgctgtatcaaaactctatcttcaatccgctaagaatcgtcaccatcagtacatcagtacatcagtgggctaagatctaatggtgtcgttcgacggccgcgggcactagccacgagccaagagcggtacagttgctgcgaaatggtgggcagcctgacaggttcagtttgaataggatgaaaacgccatgaagaacagagaagctggcaattgacgatagtggggcgagcgcacgctgcttgctggtccgagcgtaggacgaacgacaaaccatgggcggggccaccaggccccagggagggcgtcactggttggatgtcgtctgttaggctagagctcaggcgctcagggcctctggcccaagcctcggacgcaagcctctgacgagcgagcgcgcgctggggcgggtctgcgcaggaacggcaggactgccgagttggttgaatattgaatggttggatgattggtttgctgggtttggttttgacacgcacggcacaggacaagtgagtttggaggttggatttgcgcaggtagaaagggcgctcggcctcagggcctcagcgtcagcagacgagctcgccagtccaggtcagtacccagtgttcgttacttcccaccgtccagagtttgctgctgcctctcagcttgattcgtgtcggagaagtagaaatggtcacagcgtaccacacactgtccccatgcctgcgtcctgctccacgagtgtttagccacaaaaatttatggacaaccttactgagcctgtgctggggggtgctttagcaccagcactggcgccatggcgtcaaggttaattccactgtcattcgacaaccttcaactgatgggggcaactgggcacaaaaccttggatatataaccaactccaactcccacggttttttaccttttgctcttctccccaggactcactacttctactcctctattcatcttcaccaaaatgtgagacctaatatcactgctgtacagacaagactgtgtatattaggtctcaatgaaggcagtcgtgtacacgcaaccagacgcagtggccgtccttgagcgtgaaatgcctgcactggtgccaggagaggtgcttcttcgaattgatgccagcggaatttgcggttccgatttgcacgcatatcatggacatgacccacgtcgtaaacctggacttgtgttgggtcacgagtttgcaggcaccgtggttgcttctagcgatgaaagccgcctccctgtgggtcgacgcgtcacggctaatcccctcgttacatgcggacactgtgattactgccttcagggccgtgacaatctgtgtgcgaatcgtggcatggtgggtatgtctcgccctggtgccctttctgagtatcttgccattcccatgcgatgcgctattgctattcccgaagatctgccgagcgtgtctgctgcgcttaccgaacctgctgcgacggcactgcacgcagtcaatcttacaatgcgagcgatgagccgacctctcccggaggcgcgtgttttgattatcggaggtggagcgatcggcatgttgaccggagcacttgtcggtgcgtacggctgtcgctcccttgcggtcgcggaaaccaacgccctgcgccgtgcgtccgtccgacgtcatcttgcatgcgaggttttggaccctacagcgaacgccccggctgagtcttcgttcgacgtggtcattgacgcagtgggtgcggcaccaacccgccatctggcactggcggcaacgcgaccaggaggtgttatcatgcacattggactccaggcatggtccagcgaaatcgatatgcgtaagctcactcttgctgaaatcactctcctcggtacgtatacatacacgatggcggatatgcatgcgaccgtgcgagcacttgcctctggaagcttcggatctctggaatgggtcgagacgcgagccctgacagatgcgccatctgcttttgctgaccttgctgcgggtcgagtcgcggcgggcaaggttgtgcttctcccgcaacaggactaacacggatcaacaaaaatgtgcgccagctttgttgtgtgcccttttcctctagcggatcctatccacatttcgtgaatgaaccgattaagctctgacgagatttccttgttttctgtagatacctcttgtagaggtgtcaaagttatgttgtgatcgagagagttacctgcaaggtattatgcaagcggcttgatgaggacactcaactacgtgtgagtaggagtgcgttgctcagcagttgacgcgtgagccgcttgagcagcttgataaaggtcctaatcgtcttccagctgttggcagacgacaatgtgctgtagtagtaggataggcccgtaaaagtgtagaagcaataggttgagactgactgtaatgggtacttgcgttcaaagactgaaagtccaaaggattgctcaaaggcccctgaggtctgagcctctgagcgcgctcttcgtcaaaattcgccggggccatcggtcatcctctcgagggcagcatcttcctgcttgaagactgagtccgtctcagataacttcgtataatgtatgctatacgaagttatcctgcaggagctcagaccttgcatgttagccttgaccttgcctctatgaccactaattcgcacaagattgcacgttaccattgtcatcttgccatgtatccaatgtttcctgtttgccatagtacgtagtagatacatcgatcatcgatgcagatgacgcagatggcattggttcgctttgccctatgcatgcatcatgcatcatgcatcatgcgtcatgcgtcactatccatattaatcattgccctctgtactaggccatgacacctgcagacccttccccagggatgcttcttgtaatagccaatatactacacaactttaccgattacgatcgagatcgatctcactatagtttgtcgaacttcgatgcacatcgagggtgcggaaaaaagctgacggaagcggaagtgggtgaattggttaatttagttagattggcagggttgttcccaagattcaacgcaagctgagaaagaaaacagaaacacgaggcataaggccagtcagaaaatgcattacgaggggagttgaagtgactgtgggccagtgcctgggtcgtcatgtgcaaattttttcttcggttagactgccgcagcatgcagcaactctgccggccctatataactagtgcttcatcttcttgtcattcttgtctctttaccaacacaccggtactctttcaccatgggtaaggaaaagacacacgtatcgcgaccccgactcaactccaacatggacgcagacctgtacggatacaaatgggctcgagataatgtcggacagtcgggtgcgacgatctacagactctatggaaaaccggacgcccccgagctctttcttaaacacggcaagggtagcgttgcaaacgacgtaaccgacgaaatggtccgtctgaattggctaactgagttcatgccactccccaccatcaagcacttcatccgtacacctgacgatgcgtggctgttgactacggccatccccggtaagaccgcttttcaggtcctcgaggaataccctgactcgggcgagaacatcgtggatgccttggctgtgtttttgcgccgccttcactctattccggtctgcaactgccctttcaacagcgaccgtgtttttaggcttgcccaggcacaatcacgcatgaacaatggtctagtcgacgctagtgatttcgatgacgagcgcaacggctggccggtggaacaagtgtggaaagagatgcataagctcctgcccttttccccagactctgtcgtgacgcatggtgatttctcgcttgacaacctcatctttgacgagggcaagctcattggctgcattgacgtcggccgggttggcatcgccgatcgctaccaagatcttgcgatcctctggaattgtctgggcgagttctcccctagcctccagaagcgtctgttccagaaatatgggatcg

SEQ ID NO: 51 - DNA, 4624 bp, synthetic construct
  source 1..4624: mol_type = other DNA
tgcagagccttgcaaatgatgaaagaccaatggaattgatcattgattattgatgatgcatgatgaaagagatagaaacagatgcaagatgggatggcgcgatgatcaaatgataatgaacgttcaacccttcaaaattgaaactctcaggctgagcggctgagcaagctctgagaatgtgggtcttcgaagactttcgcttgagcatggtgcatgtgcaaagagatggaatgtggaattgttgtaggtaggaacacagcccggtagagcggcgcagtggctcagcgaagctgggagaacgactgaaccggtcttgagattcatcatctcagcgtgcgtcagcgcgtcagcttcagcgtttgagaatggcacggactgacctgtcgtacatcccaaggaggcccgtgcgctatactcgccttgtggcctaatctgcgatcaacccatcctcaacgaaagcgcaagtagcgactaagcacactatctttcgggtcggtgcggtcacagtatcggcatctctgtctttagctacgatggtgtgcgtgtaactgatcagtacacccgctgtatcaaaactctatcttcaatccgctaagaatcgtcaccatcagtacatcagtacatcagtgggctaagatctaatggtgtcgttcgacggccgcgggcactagccacgagccaagagcggtacagttgctgcgaaatggtgggcagcctgacaggttcagtttgaataggatgaaaacgccatgaagaacagagaagctggcaattgacgatagtggggcgagcgcacgctgcttgctggtccgagcgtaggacgaacgacaaaccatgggcggggccaccaggccccagggagggcgtcactggttggatgtcgtctgttaggctagagctcaggcgctcagggcctctggcccaagcctcggacgcaagcctctgacgagcgagcgcgcgctggggcgggtctgcgcaggaacggcaggactgccgagttggttgaatattgaatggttggatgattggtttgctgggtttggttttgacacgcacggcacaggacaagtgagtttggaggttggatttgcgcaggtagaaagggcgctcggcctcagggcctcagcgtcagcagacgagctcgccagtccaggtcagtacccagtgttcgttacttcccaccgtccagagtttgctgctgcctctcagcttgattcgtgtcggagaagtagaaatggtcacagcgtaccacacactgtccccatgcctgcgtcctgctccacgagtgtttagccacaaaaatttatggacaaccttactgagcctgtgctggggggtgctttagcaccagcactggcgccatggcgtcaaggttaattccactgtcattcgacaaccttcaactgatgggggcaactgggcacaaaaccttggatatataaccaactccaactcccacggttttttaccttttgctcttctccccaggactcactacttctactcctctattcatcttcaccaaaatgtgagacctaatatcactgctgtacagacaagactgtgtatattaggtctcaatgaagtccgtcgttattcacgccgaaggagatgtccgtgtggaagagcgacccattccccatttgcaaacggatgaagatgttttggtgaaagtcgtgtcttccggactttgtggcagcgacattccccgcatcttcaatcgtggcgctcattattacccaatcacacttggccatgaattctcgggctatgtcgagtcctatggagcgggtgtcactgacttgcaaccaggtgatgctgtcgcttgtgtgccgctcctcccgtgttttcactgcccccagtgcgagcgaggttacttctctctgtgtaagcagtatcaatttgtcggttctcgcagcgagggaggaaacgcagagtatgtcgttatgaaacgagcgaatcttttccgactcccgtccgatatgccaattgaagacggagctttcattgagcccatcaccgtcggtctgcatgccttccaccttgcgcagggttgcgagggaaagaatgtcattatcgtgggtgcaggcaccattggcctccttgccctgcaatgtgcacgagaactcggagccaaatcgattaccgcaatcgacatcaacccacagaagcttgcattggcaaaggagctgggcgcgacttacgtgtttaattcccgagaaatgtcggcgaccgaaattcactctgatttggaaaatgtgcagttcgaccaacttattctcgaaacggctggaacgcctcagactgtcacgctctccatcgaaattgcgggtccccgagcccaattggcgcttgttggtacgttgcaccacgatttggcgcttgcgtcgggtgtctttggtcaaatcttgcgcaaagagcttactatcctcggatcttggatgaactacagctctccctggccaggcgaagaatgggtcactgcggcacgtctgctgacggagaaacgtttgcaattggaaccacttattgcgcactccggagatgccgaatcctttgcgtctgcagtgaagtctctcaatggcgcacctatgcaaggtaaaattctgctcaagctttcgtaacacggatcaacaaaaatgtgcgccagctttgttgtgtgcccttttcctctagcggatcctatccacatttcgtgaatgaaccgattaagctctgacgagatttccttgttttctgtagatacctcttgtagaggtgtcaaagttatgttgtgatcgagagagttacctgcaaggtattatgcaagcggcttgatgaggacactcaactacgtgtgagtaggagtgcgttgctcagcagttgacgcgtgagccgcttgagcagcttgataaaggtcctaatcgtcttccagctgttggcagacgacaatgtgctgtagtagtaggataggcccgtaaaagtgtagaagcaataggttgagactgactgtaatgggtacttgcgttcaaagactgaaagtccaaaggattgctcaaaggcccctgaggtctgagcctctgagcgcgctcttcgtcaaaattcgccggggccatcggtcatcctctcgagggcagcatcttcctgcttgaagactgagtccgtctcagataacttcgtataatgtatgctatacgaagttatcctgcaggagctcagaccttgcatgttagccttgaccttgcctctatgaccactaattcgcacaagattgcacgttaccattgtcatcttgccatgtatccaatgtttcctgtttgccatagtacgtagtagatacatcgatcatcgatgcagatgacgcagatggcattggttcgctttgccctatgcatgcatcatgcatcatgcatcatgcgtcatgcgtcactatccatattaatcattgccctctgtactaggccatgacacctgcagacccttccccagggatgcttcttgtaatagccaatatactacacaactttaccgattacgatcgagatcgatctcactatagtttgtcgaacttcgatgcacatcgagggtgcggaaaaaagctgacggaagcggaagtgggtgaattggttaatttagttagattggcagggttgttcccaagattcaacgcaagctgagaaagaaaacagaaacacgaggcataaggccagtcagaaaatgcattacgaggggagttgaagtgactgtgggccagtgcctgggtcgtcatgtgcaaattttttcttcggttagactgccgcagcatgcagcaactctgccggccctatataactagtgcttcatcttcttgtcattcttgtctctttaccaacacaccggtactctttcaccatgggtaaggaaaagacacacgtatcgcgaccccgactcaactccaacatggacgcagacctgtacggatacaaatgggctcgagataatgtcggacagtcgggtgcgacgatctacagactctatggaaaaccggacgcccccgagctctttcttaaacacggcaagggtagcgttgcaaacgacgtaaccgacgaaatggtccgtctgaattggctaactgagttcatgccactccccaccatcaagcacttcatccgtacacctgacgatgcgtggctgttgactacggccatccccggtaagaccgcttttcaggtcctcgaggaataccctgactcgggcgagaacatcgtggatgccttggctgtgtttttgcgccgccttcactctattccggtctgcaactgccctttcaacagcgaccgtgtttttaggcttgcccaggcacaatcacgcatgaacaatggtctagtcgacgctagtgatttcgatgacgagcgcaacggctggccggtggaacaagtgtggaaagagatgcataagctcctgcccttttccccagactctgtcgtgacgcatggtgatttctcgcttgacaacctcatctttgacgagggcaagctcattggctgcattgacgtcggccgggttggcatcgccgatcgctaccaagatcttgcgatcctctggaattgtctgggcgagttctcccctagcctccagaagcgtctgttccagaaatatgggatcg

SEQ ID NO: 52 - DNA, 4621 bp, synthetic construct
  source 1..4621: mol_type = other DNA
tgcagagccttgcaaatgatgaaagaccaatggaattgatcattgattattgatgatgcatgatgaaagagatagaaacagatgcaagatgggatggcgcgatgatcaaatgataatgaacgttcaacccttcaaaattgaaactctcaggctgagcggctgagcaagctctgagaatgtgggtcttcgaagactttcgcttgagcatggtgcatgtgcaaagagatggaatgtggaattgttgtaggtaggaacacagcccggtagagcggcgcagtggctcagcgaagctgggagaacgactgaaccggtcttgagattcatcatctcagcgtgcgtcagcgcgtcagcttcagcgtttgagaatggcacggactgacctgtcgtacatcccaaggaggcccgtgcgctatactcgccttgtggcctaatctgcgatcaacccatcctcaacgaaagcgcaagtagcgactaagcacactatctttcgggtcggtgcggtcacagtatcggcatctctgtctttagctacgatggtgtgcgtgtaactgatcagtacacccgctgtatcaaaactctatcttcaatccgctaagaatcgtcaccatcagtacatcagtacatcagtgggctaagatctaatggtgtcgttcgacggccgcgggcactagccacgagccaagagcggtacagttgctgcgaaatggtgggcagcctgacaggttcagtttgaataggatgaaaacgccatgaagaacagagaagctggcaattgacgatagtggggcgagcgcacgctgcttgctggtccgagcgtaggacgaacgacaaaccatgggcggggccaccaggccccagggagggcgtcactggttggatgtcgtctgttaggctagagctcaggcgctcagggcctctggcccaagcctcggacgcaagcctctgacgagcgagcgcgcgctggggcgggtctgcgcaggaacggcaggactgccgagttggttgaatattgaatggttggatgattggtttgctgggtttggttttgacacgcacggcacaggacaagtgagtttggaggttggatttgcgcaggtagaaagggcgctcggcctcagggcctcagcgtcagcagacgagctcgccagtccaggtcagtacccagtgttcgttacttcccaccgtccagagtttgctgctgcctctcagcttgattcgtgtcggagaagtagaaatggtcacagcgtaccacacactgtccccatgcctgcgtcctgctccacgagtgtttagccacaaaaatttatggacaaccttactgagcctgtgctggggggtgctttagcaccagcactggcgccatggcgtcaaggttaattccactgtcattcgacaaccttcaactgatgggggcaactgggcacaaaaccttggatatataaccaactccaactcccacggttttttaccttttgctcttctccccaggactcactacttctactcctctattcatcttcaccaaaatgtgagacctaatatcactgctgtacagacaagactgtgtatattaggtctcaatgaaatctgttgtgaacgatacggacggtattgttcgtattgcagagtcggtgattcccgaaattaaacaccaagatcaagtgcgtgttaagatcgcctcttccggcctttgtggttctgacctgccgcgcatttttaagaacggagcacactattatcccatcactctcggacacgaattttcgggatacatcgatgcagttggctccggtgtcgatgatcttcatcctggtgacgccgtggcatgtgttccccttctgccctgttttacctgtccagaatgtctgaaaggcttttacagccaatgtgccaagtacgattttattggatcccgtcgtgatggtggtttcgcggagtatatcgtggttaagcgaaaaaacgtgtttgctttgcccactgacatgtctattgaagatggagcctttatcgaaccaattacggttggccttcacgcgttccacctcgcgcaaggttgcgaaaataagaatgtcattattattggcgccggtactatcggcctgcttgcaatccagtgtgccgtcgctctcggtgccaagtctgttaccgccatcgacatctcgtctgaaaaactcgccctggccaagtcttttggagcgatgttgacgttcaattccttggagatgtccgcccctcagatgcaaggagtcctccgagaattgcgattcaatcagttgattctggaaaccgctggcgtgcctaagaccgtggaactggcggtcgagattgctggaccccacgctcaactggccttggttggcactttgcaccaagacttgcatcttacgagcaccacttttggaaaaatcctgcgcaaagagcttactgtcatcggatcttggatgaattattcgtccccttggcctggtcaagaatgggagactgcatctcgtctcctcaccgagcgaaagttgtctctcgaaccgttgattgctcatcgtggcagctttgaatcgttcgctcaggctgtccgagacattgctcgcaatgccatgccaggaaaagtgcttctgattccttaacacggatcaacaaaaatgtgcgccagctttgttgtgtgcccttttcctctagcggatcctatccacatttcgtgaatgaaccgattaagctctgacgagatttccttgttttctgtagatacctcttgtagaggtgtcaaagttatgttgtgatcgagagagttacctgcaaggtattatgcaagcggcttgatgaggacactcaactacgtgtgagtaggagtgcgttgctcagcagttgacgcgtgagccgcttgagcagcttgataaaggtcctaatcgtcttccagctgttggcagacgacaatgtgctgtagtagtaggataggcccgtaaaagtgtagaagcaataggttgagactgactgtaatgggtacttgcgttcaaagactgaaagtccaaaggattgctcaaaggcccctgaggtctgagcctctgagcgcgctcttcgtcaaaattcgccggggccatcggtcatcctctcgagggcagcatcttcctgcttgaagactgagtccgtctcagataacttcgtataatgtatgctatacgaagttatcctgcaggagctcagaccttgcatgttagccttgaccttgcctctatgaccactaattcgcacaagattgcacgttaccattgtcatcttgccatgtatccaatgtttcctgtttgccatagtacgtagtagatacatcgatcatcgatgcagatgacgcagatggcattggttcgctttgccctatgcatgcatcatgcatcatgcatcatgcgtcatgcgtcactatccatattaatcattgccctctgtactaggccatgacacctgcagacccttccccagggatgcttcttgtaatagccaatatactacacaactttaccgattacgatcgagatcgatctcactatagtttgtcgaacttcgatgcacatcgagggtgcggaaaaaagctgacggaagcggaagtgggtgaattggttaatttagttagattggcagggttgttcccaagattcaacgcaagctgagaaagaaaacagaaacacgaggcataaggccagtcagaaaatgcattacgaggggagttgaagtgactgtgggccagtgcctgggtcgtcatgtgcaaattttttcttcggttagactgccgcagcatgcagcaactctgccggccctatataactagtgcttcatcttcttgtcattcttgtctctttaccaacacaccggtactctttcaccatgggtaaggaaaagacacacgtatcgcgaccccgactcaactccaacatggacgcagacctgtacggatacaaatgggctcgagataatgtcggacagtcgggtgcgacgatctacagactctatggaaaaccggacgcccccgagctctttcttaaacacggcaagggtagcgttgcaaacgacgtaaccgacgaaatggtccgtctgaattggctaactgagttcatgccactccccaccatcaagcacttcatccgtacacctgacgatgcgtggctgttgactacggccatccccggtaagaccgcttttcaggtcctcgaggaataccctgactcgggcgagaacatcgtggatgccttggctgtgtttttgcgccgccttcactctattccggtctgcaactgccctttcaacagcgaccgtgtttttaggcttgcccaggcacaatcacgcatgaacaatggtctagtcgacgctagtgatttcgatgacgagcgcaacggctggccggtggaacaagtgtggaaagagatgcataagctcctgcccttttccccagactctgtcgtgacgcatggtgatttctcgcttgacaacctcatctttgacgagggcaagctcattggctgcattgacgtcggccgggttggcatcgccgatcgctaccaagatcttgcgatcctctggaattgtctgggcgagttctcccctagcctccagaagcgtctgttccagaaatatgggatcg

SEQ ID NO: 53 - DNA, 4600 bp, synthetic construct
  source 1..4600: mol_type = other DNA
tgcagagccttgcaaatgatgaaagaccaatggaattgatcattgattattgatgatgcatgatgaaagagatagaaacagatgcaagatgggatggcgcgatgatcaaatgataatgaacgttcaacccttcaaaattgaaactctcaggctgagcggctgagcaagctctgagaatgtgggtcttcgaagactttcgcttgagcatggtgcatgtgcaaagagatggaatgtggaattgttgtaggtaggaacacagcccggtagagcggcgcagtggctcagcgaagctgggagaacgactgaaccggtcttgagattcatcatctcagcgtgcgtcagcgcgtcagcttcagcgtttgagaatggcacggactgacctgtcgtacatcccaaggaggcccgtgcgctatactcgccttgtggcctaatctgcgatcaacccatcctcaacgaaagcgcaagtagcgactaagcacactatctttcgggtcggtgcggtcacagtatcggcatctctgtctttagctacgatggtgtgcgtgtaactgatcagtacacccgctgtatcaaaactctatcttcaatccgctaagaatcgtcaccatcagtacatcagtacatcagtgggctaagatctaatggtgtcgttcgacggccgcgggcactagccacgagccaagagcggtacagttgctgcgaaatggtgggcagcctgacaggttcagtttgaataggatgaaaacgccatgaagaacagagaagctggcaattgacgatagtggggcgagcgcacgctgcttgctggtccgagcgtaggacgaacgacaaaccatgggcggggccaccaggccccagggagggcgtcactggttggatgtcgtctgttaggctagagctcaggcgctcagggcctctggcccaagcctcggacgcaagcctctgacgagcgagcgcgcgctggggcgggtctgcgcaggaacggcaggactgccgagttggttgaatattgaatggttggatgattggtttgctgggtttggttttgacacgcacggcacaggacaagtgagtttggaggttggatttgcgcaggtagaaagggcgctcggcctcagggcctcagcgtcagcagacgagctcgccagtccaggtcagtacccagtgttcgttacttcccaccgtccagagtttgctgctgcctctcagcttgattcgtgtcggagaagtagaaatggtcacagcgtaccacacactgtccccatgcctgcgtcctgctccacgagtgtttagccacaaaaatttatggacaaccttactgagcctgtgctggggggtgctttagcaccagcactggcgccatggcgtcaaggttaattccactgtcattcgacaaccttcaactgatgggggcaactgggcacaaaaccttggatatataaccaactccaactcccacggttttttaccttttgctcttctccccaggactcactacttctactcctctattcatcttcaccaaaatgtgagacctaatatcactgctgtacagacaagactgtgtatattaggtctcaatgaaatctattctgattgagaaaccaaaccaattggccattgttgaacgtgaaatcccaactccatccgccggtgaagttcgtgtgaaagtgaagctggcgggaatctgcggatccgattcccatatttaccgtggtcataacccatttgcaaaatatcctcgtgtgatcggacacgaattttttggtgtcattgacgcagtcggagaaggtgttgaaagcgcccgcgttggtgaacgagttgcagtggatcccgtggtgtcgtgcggccattgctatccctgctctatcggaaagcccaatgtttgtactaccttggcggtgctgggcgtgcatgcggacggaggcttctctgagtacgcggtggttccggccaagaacgcgtggaagattcccgaggcagttgccgatcaatatgccgtgatgattgagccgtttacaatcgccgcgaacgtgacgggacacggtcagccaactgaaaatgacactgttctggtgtatggcgctggacccattggcctcacaattgttcaagtcctgaaaggagtgtataatgtcaaaaacgtgattgtcgccgatcgaattgacgagcgacttgagaaggccaaggaatccggagctgactgggctattaataatagccagacaccgctgggcgagattttcactgaaaaaggcattaagccgacgctgattattgatgccgcttgtcacccctcgattctgaaggaggcggtgacgctggcttctccagcggcacgtattgttctgatgggattctcgtctgaaccatctgaagttattcagcaaggaattacgggcaaggagctctctattttctccagccgccttaacgcaaacaagttccccatcgtgatcgattggctctccaagggcctgattaaaccagaaaagctcattacgcacacgtttgattttcaacatgttgcggacgctatcagcctttttgagcaagaccagaaacactgctgtaaggtgctgctcactttctccgagtaacacggatcaacaaaaatgtgcgccagctttgttgtgtgcccttttcctctagcggatcctatccacatttcgtgaatgaaccgattaagctctgacgagatttccttgttttctgtagatacctcttgtagaggtgtcaaagttatgttgtgatcgagagagttacctgcaaggtattatgcaagcggcttgatgaggacactcaactacgtgtgagtaggagtgcgttgctcagcagttgacgcgtgagccgcttgagcagcttgataaaggtcctaatcgtcttccagctgttggcagacgacaatgtgctgtagtagtaggataggcccgtaaaagtgtagaagcaataggttgagactgactgtaatgggtacttgcgttcaaagactgaaagtccaaaggattgctcaaaggcccctgaggtctgagcctctgagcgcgctcttcgtcaaaattcgccggggccatcggtcatcctctcgagggcagcatcttcctgcttgaagactgagtccgtctcagataacttcgtataatgtatgctatacgaagttatcctgcaggagctcagaccttgcatgttagccttgaccttgcctctatgaccactaattcgcacaagattgcacgttaccattgtcatcttgccatgtatccaatgtttcctgtttgccatagtacgtagtagatacatcgatcatcgatgcagatgacgcagatggcattggttcgctttgccctatgcatgcatcatgcatcatgcatcatgcgtcatgcgtcactatccatattaatcattgccctctgtactaggccatgacacctgcagacccttccccagggatgcttcttgtaatagccaatatactacacaactttaccgattacgatcgagatcgatctcactatagtttgtcgaacttcgatgcacatcgagggtgcggaaaaaagctgacggaagcggaagtgggtgaattggttaatttagttagattggcagggttgttcccaagattcaacgcaagctgagaaagaaaacagaaacacgaggcataaggccagtcagaaaatgcattacgaggggagttgaagtgactgtgggccagtgcctgggtcgtcatgtgcaaattttttcttcggttagactgccgcagcatgcagcaactctgccggccctatataactagtgcttcatcttcttgtcattcttgtctctttaccaacacaccggtactctttcaccatgggtaaggaaaagacacacgtatcgcgaccccgactcaactccaacatggacgcagacctgtacggatacaaatgggctcgagataatgtcggacagtcgggtgcgacgatctacagactctatggaaaaccggacgcccccgagctctttcttaaacacggcaagggtagcgttgcaaacgacgtaaccgacgaaatggtccgtctgaattggctaactgagttcatgccactccccaccatcaagcacttcatccgtacacctgacgatgcgtggctgttgactacggccatccccggtaagaccgcttttcaggtcctcgaggaataccctgactcgggcgagaacatcgtggatgccttggctgtgtttttgcgccgccttcactctattccggtctgcaactgccctttcaacagcgaccgtgtttttaggcttgcccaggcacaatcacgcatgaacaatggtctagtcgacgctagtgatttcgatgacgagcgcaacggctggccggtggaacaagtgtggaaagagatgcataagctcctgcccttttccccagactctgtcgtgacgcatggtgatttctcgcttgacaacctcatctttgacgagggcaagctcattggctgcattgacgtcggccgggttggcatcgccgatcgctaccaagatcttgcgatcctctggaattgtctgggcgagttctcccctagcctccagaagcgtctgttccagaaatatgggatcg

SEQ ID NO: 54 - DNA, 4654 bp, synthetic construct
  source 1..4654: mol_type = other DNA
tgcagagccttgcaaatgatgaaagaccaatggaattgatcattgattattgatgatgcatgatgaaagagatagaaacagatgcaagatgggatggcgcgatgatcaaatgataatgaacgttcaacccttcaaaattgaaactctcaggctgagcggctgagcaagctctgagaatgtgggtcttcgaagactttcgcttgagcatggtgcatgtgcaaagagatggaatgtggaattgttgtaggtaggaacacagcccggtagagcggcgcagtggctcagcgaagctgggagaacgactgaaccggtcttgagattcatcatctcagcgtgcgtcagcgcgtcagcttcagcgtttgagaatggcacggactgacctgtcgtacatcccaaggaggcccgtgcgctatactcgccttgtggcctaatctgcgatcaacccatcctcaacgaaagcgcaagtagcgactaagcacactatctttcgggtcggtgcggtcacagtatcggcatctctgtctttagctacgatggtgtgcgtgtaactgatcagtacacccgctgtatcaaaactctatcttcaatccgctaagaatcgtcaccatcagtacatcagtacatcagtgggctaagatctaatggtgtcgttcgacggccgcgggcactagccacgagccaagagcggtacagttgctgcgaaatggtgggcagcctgacaggttcagtttgaataggatgaaaacgccatgaagaacagagaagctggcaattgacgatagtggggcgagcgcacgctgcttgctggtccgagcgtaggacgaacgacaaaccatgggcggggccaccaggccccagggagggcgtcactggttggatgtcgtctgttaggctagagctcaggcgctcagggcctctggcccaagcctcggacgcaagcctctgacgagcgagcgcgcgctggggcgggtctgcgcaggaacggcaggactgccgagttggttgaatattgaatggttggatgattggtttgctgggtttggttttgacacgcacggcacaggacaagtgagtttggaggttggatttgcgcaggtagaaagggcgctcggcctcagggcctcagcgtcagcagacgagctcgccagtccaggtcagtacccagtgttcgttacttcccaccgtccagagtttgctgctgcctctcagcttgattcgtgtcggagaagtagaaatggtcacagcgtaccacacactgtccccatgcctgcgtcctgctccacgagtgtttagccacaaaaatttatggacaaccttactgagcctgtgctggggggtgctttagcaccagcactggcgccatggcgtcaaggttaattccactgtcattcgacaaccttcaactgatgggggcaactgggcacaaaaccttggatatataaccaactccaactcccacggttttttaccttttgctcttctccccaggactcactacttctactcctctattcatcttcaccaaaatgtgagacctaatatcactgctgtacagacaagactgtgtatattaggtctcaatgaacattccgaccaagatgaaggcagtcgttaaatcggaggcaggttatgacaatatgtccctgcaagagattcctgtcccagaagttaagggaaaacaggtgttgatgaaagtcgcctatacgggtatctgcggtacggacattcatacctttaaaggcgagtacgccaatgccgtgaccccacttgtcctcggccatgaattttctggcaaggtcgttgccgtcggagatgaagttaccaaggtcaaaccgggtgaccgagttacctccgaaacaacatttgatacatgcggagagtgtgtgtactgtaaaaataaggaatataacctgtgcgaaaaccgttcgggtattggtacgaaagccaatggatcgatggctaattatgtgcttacgcgagaggagtctgtgcatgtccttcctgacaatgtttcctacaaacttgccgcgatgtctgagccgctggcttcctgtgtgcacgcaatgtaccagaaaaccccgttcacccttcatgatacagttctcattatcggccccggacctatgggtttgctctctctgcagattgcaaaggaaattggagcctttaccatcgtctccggtattacgaaagacagcgaccgcctggaaatcgcaaaagaacttggagccgacatcgttgttgacacgcagaaggaagacttggcgaagatcgtcatggaggctactaacggagtgggagttaccaaagtctatgattgtagcggcgctacaccagcggtgaatgctgccctcccccttctgaagaagggaggtacttttcagcaggttggcctgtttgcaaagcctctgaacgaattggatgaacgtacaattattcagcacgaaattacatacgtgggatcccgttctcagaatccgtatgattggcctatcgccattcacctggaggccaaaggtgctattaatgaagataaaatggttacgaaagtcttcgatttggatcattggcgtgaggcattcgaggctatgatggctggaaaagaactcaaggttcttattgccagcaatccagacgacgaaactcttaattaacacggatcaacaaaaatgtgcgccagctttgttgtgtgcccttttcctctagcggatcctatccacatttcgtgaatgaaccgattaagctctgacgagatttccttgttttctgtagatacctcttgtagaggtgtcaaagttatgttgtgatcgagagagttacctgcaaggtattatgcaagcggcttgatgaggacactcaactacgtgtgagtaggagtgcgttgctcagcagttgacgcgtgagccgcttgagcagcttgataaaggtcctaatcgtcttccagctgttggcagacgacaatgtgctgtagtagtaggataggcccgtaaaagtgtagaagcaataggttgagactgactgtaatgggtacttgcgttcaaagactgaaagtccaaaggattgctcaaaggcccctgaggtctgagcctctgagcgcgctcttcgtcaaaattcgccggggccatcggtcatcctctcgagggcagcatcttcctgcttgaagactgagtccgtctcagataacttcgtataatgtatgctatacgaagttatcctgcaggagctcagaccttgcatgttagccttgaccttgcctctatgaccactaattcgcacaagattgcacgttaccattgtcatcttgccatgtatccaatgtttcctgtttgccatagtacgtagtagatacatcgatcatcgatgcagatgacgcagatggcattggttcgctttgccctatgcatgcatcatgcatcatgcatcatgcgtcatgcgtcactatccatattaatcattgccctctgtactaggccatgacacctgcagacccttccccagggatgcttcttgtaatagccaatatactacacaactttaccgattacgatcgagatcgatctcactatagtttgtcgaacttcgatgcacatcgagggtgcggaaaaaagctgacggaagcggaagtgggtgaattggttaatttagttagattggcagggttgttcccaagattcaacgcaagctgagaaagaaaacagaaacacgaggcataaggccagtcagaaaatgcattacgaggggagttgaagtgactgtgggccagtgcctgggtcgtcatgtgcaaattttttcttcggttagactgccgcagcatgcagcaactctgccggccctatataactagtgcttcatcttcttgtcattcttgtctctttaccaacacaccggtactctttcaccatgggtaaggaaaagacacacgtatcgcgaccccgactcaactccaacatggacgcagacctgtacggatacaaatgggctcgagataatgtcggacagtcgggtgcgacgatctacagactctatggaaaaccggacgcccccgagctctttcttaaacacggcaagggtagcgttgcaaacgacgtaaccgacgaaatggtccgtctgaattggctaactgagttcatgccactccccaccatcaagcacttcatccgtacacctgacgatgcgtggctgttgactacggccatccccggtaagaccgcttttcaggtcctcgaggaataccctgactcgggcgagaacatcgtggatgccttggctgtgtttttgcgccgccttcactctattccggtctgcaactgccctttcaacagcgaccgtgtttttaggcttgcccaggcacaatcacgcatgaacaatggtctagtcgacgctagtgatttcgatgacgagcgcaacggctggccggtggaacaagtgtggaaagagatgcataagctcctgcccttttccccagactctgtcgtgacgcatggtgatttctcgcttgacaacctcatctttgacgagggcaagctcattggctgcattgacgtcggccgggttggcatcgccgatcgctaccaagatcttgcgatcctctggaattgtctgggcgagttctcccctagcctccagaagcgtctgttccagaaatatgggatcg

SEQ ID NO: 55 - DNA, 4579 bp, synthetic construct
  source 1..4579: mol_type = other DNA
tgcagagccttgcaaatgatgaaagaccaatggaattgatcattgattattgatgatgcatgatgaaagagatagaaacagatgcaagatgggatggcgcgatgatcaaatgataatgaacgttcaacccttcaaaattgaaactctcaggctgagcggctgagcaagctctgagaatgtgggtcttcgaagactttcgcttgagcatggtgcatgtgcaaagagatggaatgtggaattgttgtaggtaggaacacagcccggtagagcggcgcagtggctcagcgaagctgggagaacgactgaaccggtcttgagattcatcatctcagcgtgcgtcagcgcgtcagcttcagcgtttgagaatggcacggactgacctgtcgtacatcccaaggaggcccgtgcgctatactcgccttgtggcctaatctgcgatcaacccatcctcaacgaaagcgcaagtagcgactaagcacactatctttcgggtcggtgcggtcacagtatcggcatctctgtctttagctacgatggtgtgcgtgtaactgatcagtacacccgctgtatcaaaactctatcttcaatccgctaagaatcgtcaccatcagtacatcagtacatcagtgggctaagatctaatggtgtcgttcgacggccgcgggcactagccacgagccaagagcggtacagttgctgcgaaatggtgggcagcctgacaggttcagtttgaataggatgaaaacgccatgaagaacagagaagctggcaattgacgatagtggggcgagcgcacgctgcttgctggtccgagcgtaggacgaacgacaaaccatgggcggggccaccaggccccagggagggcgtcactggttggatgtcgtctgttaggctagagctcaggcgctcagggcctctggcccaagcctcggacgcaagcctctgacgagcgagcgcgcgctggggcgggtctgcgcaggaacggcaggactgccgagttggttgaatattgaatggttggatgattggtttgctgggtttggttttgacacgcacggcacaggacaagtgagtttggaggttggatttgcgcaggtagaaagggcgctcggcctcagggcctcagcgtcagcagacgagctcgccagtccaggtcagtacccagtgttcgttacttcccaccgtccagagtttgctgctgcctctcagcttgattcgtgtcggagaagtagaaatggtcacagcgtaccacacactgtccccatgcctgcgtcctgctccacgagtgtttagccacaaaaatttatggacaaccttactgagcctgtgctggggggtgctttagcaccagcactggcgccatggcgtcaaggttaattccactgtcattcgacaaccttcaactgatgggggcaactgggcacaaaaccttggatatataaccaactccaactcccacggttttttaccttttgctcttctccccaggactcactacttctactcctctattcatcttcaccaaaatgaaagccgcggtcctccatggaacgaacgacatgcgcttcgaggatattgaaatcaagccgtgcgaaagcgacgaggtcaagatcaaggtcatggccgctggcatttgtggatctgatcccccccgagtgctgaaacattggaagtatcctgttccggctattcctggacatgagttctctggtgttatcgcggaggtcggaaaagatgtgaaaaatgtcaaggtgggtgaccgagttgtggcgatcccctttattccgtgtaatgaatgtgagtactgtaaacgaggtctttttagcctttgtgacgatcacggaatgctgggtgccaaatcctttggagcatttgccgagtatgtgaacattaaggcgactaatgtccttcccatcggcgatatggatttcgaagacgcagcgatgattgagccccttgccgtcgccatgcacggagtgttgaacatcggagttcaagtgggagatacggtcgccgtcatgggctcgggcacaatgggtcaacttgtgattcagggtcttaaaattgctggtgctggcactatcattgctgttgacatttctgataacaaactgcgagagtccaaggaattgggcgctgacattatcattaacgcaaaggacattaaccctgttgaaaaaatcaaagagcttacaggcggaaaaggagtggacatcgctctggaatgtgcgggttccaaaattacccaagagcaatgcctcttgatcactaaaaaaaagtcgaagatcggtttcctgggaattgcgtactctgacattaccttgtcggaggaggcgttcgagaacatctttcgcaaagagctcgaacttaaaggattctggaacagctattcggcaccctttcctggccaagagtggaccaagggcattaatcttgttaacgagggaaaaattaagctgaaggaaatggtttcgcaccgcttttctcttgaggatacgtataaagcgttcgagatgatccgagatcgcaaggaagagtttaacaaaatcctgatccttccccagggcgtggaaaaataacacggatcaacaaaaatgtgcgccagctttgttgtgtgcccttttcctctagcggatcctatccacatttcgtgaatgaaccgattaagctctgacgagatttccttgttttctgtagatacctcttgtagaggtgtcaaagttatgttgtgatcgagagagttacctgcaaggtattatgcaagcggcttgatgaggacactcaactacgtgtgagtaggagtgcgttgctcagcagttgacgcgtgagccgcttgagcagcttgataaaggtcctaatcgtcttccagctgttggcagacgacaatgtgctgtagtagtaggataggcccgtaaaagtgtagaagcaataggttgagactgactgtaatgggtacttgcgttcaaagactgaaagtccaaaggattgctcaaaggcccctgaggtctgagcctctgagcgcgctcttcgtcaaaattcgccggggccatcggtcatcctctcgagggcagcatcttcctgcttgaagactgagtccgtctcagataacttcgtataatgtatgctatacgaagttatcctgcaggagctcagaccttgcatgttagccttgaccttgcctctatgaccactaattcgcacaagattgcacgttaccattgtcatcttgccatgtatccaatgtttcctgtttgccatagtacgtagtagatacatcgatcatcgatgcagatgacgcagatggcattggttcgctttgccctatgcatgcatcatgcatcatgcatcatgcgtcatgcgtcactatccatattaatcattgccctctgtactaggccatgacacctgcagacccttccccagggatgcttcttgtaatagccaatatactacacaactttaccgattacgatcgagatcgatctcactatagtttgtcgaacttcgatgcacatcgagggtgcggaaaaaagctgacggaagcggaagtgggtgaattggttaatttagttagattggcagggttgttcccaagattcaacgcaagctgagaaagaaaacagaaacacgaggcataaggccagtcagaaaatgcattacgaggggagttgaagtgactgtgggccagtgcctgggtcgtcatgtgcaaattttttcttcggttagactgccgcagcatgcagcaactctgccggccctatataactagtgcttcatcttcttgtcattcttgtctctttaccaacacaccggtactctttcaccatgggtaaggaaaagacacacgtatcgcgaccccgactcaactccaacatggacgcagacctgtacggatacaaatgggctcgagataatgtcggacagtcgggtgcgacgatctacagactctatggaaaaccggacgcccccgagctctttcttaaacacggcaagggtagcgttgcaaacgacgtaaccgacgaaatggtccgtctgaattggctaactgagttcatgccactccccaccatcaagcacttcatccgtacacctgacgatgcgtggctgttgactacggccatccccggtaagaccgcttttcaggtcctcgaggaataccctgactcgggcgagaacatcgtggatgccttggctgtgtttttgcgccgccttcactctattccggtctgcaactgccctttcaacagcgaccgtgtttttaggcttgcccaggcacaatcacgcatgaacaatggtctagtcgacgctagtgatttcgatgacgagcgcaacggctggccggtggaacaagtgtggaaagagatgcataagctcctgcccttttccccagactctgtcgtgacgcatggtgatttctcgcttgacaacctcatctttgacgagggcaagctcattggctgcattgacgtcggccgggttggcatcgccgatcgctaccaagatcttgcgatcctctggaattgtctgggcgagttctcccctagcctccagaagcgtctgttccagaaatatgggatcg

SEQ ID NO: 56 - DNA, 4633 bp, synthetic construct
  source 1..4633: mol_type = other DNA
tgcagagccttgcaaatgatgaaagaccaatggaattgatcattgattattgatgatgcatgatgaaagagatagaaacagatgcaagatgggatggcgcgatgatcaaatgataatgaacgttcaacccttcaaaattgaaactctcaggctgagcggctgagcaagctctgagaatgtgggtcttcgaagactttcgcttgagcatggtgcatgtgcaaagagatggaatgtggaattgttgtaggtaggaacacagcccggtagagcggcgcagtggctcagcgaagctgggagaacgactgaaccggtcttgagattcatcatctcagcgtgcgtcagcgcgtcagcttcagcgtttgagaatggcacggactgacctgtcgtacatcccaaggaggcccgtgcgctatactcgccttgtggcctaatctgcgatcaacccatcctcaacgaaagcgcaagtagcgactaagcacactatctttcgggtcggtgcggtcacagtatcggcatctctgtctttagctacgatggtgtgcgtgtaactgatcagtacacccgctgtatcaaaactctatcttcaatccgctaagaatcgtcaccatcagtacatcagtacatcagtgggctaagatctaatggtgtcgttcgacggccgcgggcactagccacgagccaagagcggtacagttgctgcgaaatggtgggcagcctgacaggttcagtttgaataggatgaaaacgccatgaagaacagagaagctggcaattgacgatagtggggcgagcgcacgctgcttgctggtccgagcgtaggacgaacgacaaaccatgggcggggccaccaggccccagggagggcgtcactggttggatgtcgtctgttaggctagagctcaggcgctcagggcctctggcccaagcctcggacgcaagcctctgacgagcgagcgcgcgctggggcgggtctgcgcaggaacggcaggactgccgagttggttgaatattgaatggttggatgattggtttgctgggtttggttttgacacgcacggcacaggacaagtgagtttggaggttggatttgcgcaggtagaaagggcgctcggcctcagggcctcagcgtcagcagacgagctcgccagtccaggtcagtacccagtgttcgttacttcccaccgtccagagtttgctgctgcctctcagcttgattcgtgtcggagaagtagaaatggtcacagcgtaccacacactgtccccatgcctgcgtcctgctccacgagtgtttagccacaaaaatttatggacaaccttactgagcctgtgctggggggtgctttagcaccagcactggcgccatggcgtcaaggttaattccactgtcattcgacaaccttcaactgatgggggcaactgggcacaaaaccttggatatataaccaactccaactcccacggttttttaccttttgctcttctccccaggactcactacttctactcctctattcatcttcaccaaaatgtgagacctaatatcactgctgtacagacaagactgtgtatattaggtctcaatgaagtcggtccgattttatggaattcgtgatacacgagtcgaagacgttgacgtgcccaagattctggaaaaggatgacgtcattatcaaggtcaaggtggcgggcatctgtggttctgacattagcaaatactcgaaaacaggcccgcacatggttggcgagattttgggacacgagttctccggcgaggtcgctcaggtcggcaaggaagttcgctccttcaagatcggagatcgagtcgcagtttgccctgcgatgccctgcttcgagtgtgatgagtgcaaaaaaggtttgtattcccgttgcaataatgtcgctatcatcggaaataaggagctcggaggatgttttgcggagtacacgaaagttaaagagcgcaatctgattaaaattccagatgagattagctacgaaaccgctgcggcccttgaacccgtctgtatcgcaggacatggtcttttccgctctgaagccaaggtcggagatacggtcgttgtgctgggaacgggtcctatcggattgttcagcattcagtgggccaaaatctttggttccacgaagattatcgcggttgacgtgtttgacgaaaaactggacttggcgaaagagctcggtgcggatatttgtattaatgctaaggagaaaaatatcgttgaagagatcaaacgactgacagacggagatggtgcagatattgtcattgagtctgccggtaccccgcttacatgtggccaggtgcttctgctggcgaaaaaaggtggtactgtcttgtatgcaggcgtcccatacggcgacgtcgcccttactcgagaacaatttgagaaaatcgttcgaagcgagcttacggtgaaaggaacttggtttggcaattctttcccatttccgggaaaggaatggtctgctggcctgtaccacatgcagaaaggagacatgaacgtggaaaagcttgtcactcaccgtatcaatctggaagaagctccagcatacttcgagaaggtttataaacgtgatatcttctttggtaagattatgattaatattgacaattaacacggatcaacaaaaatgtgcgccagctttgttgtgtgcccttttcctctagcggatcctatccacatttcgtgaatgaaccgattaagctctgacgagatttccttgttttctgtagatacctcttgtagaggtgtcaaagttatgttgtgatcgagagagttacctgcaaggtattatgcaagcggcttgatgaggacactcaactacgtgtgagtaggagtgcgttgctcagcagttgacgcgtgagccgcttgagcagcttgataaaggtcctaatcgtcttccagctgttggcagacgacaatgtgctgtagtagtaggataggcccgtaaaagtgtagaagcaataggttgagactgactgtaatgggtacttgcgttcaaagactgaaagtccaaaggattgctcaaaggcccctgaggtctgagcctctgagcgcgctcttcgtcaaaattcgccggggccatcggtcatcctctcgagggcagcatcttcctgcttgaagactgagtccgtctcagataacttcgtataatgtatgctatacgaagttatcctgcaggagctcagaccttgcatgttagccttgaccttgcctctatgaccactaattcgcacaagattgcacgttaccattgtcatcttgccatgtatccaatgtttcctgtttgccatagtacgtagtagatacatcgatcatcgatgcagatgacgcagatggcattggttcgctttgccctatgcatgcatcatgcatcatgcatcatgcgtcatgcgtcactatccatattaatcattgccctctgtactaggccatgacacctgcagacccttccccagggatgcttcttgtaatagccaatatactacacaactttaccgattacgatcgagatcgatctcactatagtttgtcgaacttcgatgcacatcgagggtgcggaaaaaagctgacggaagcggaagtgggtgaattggttaatttagttagattggcagggttgttcccaagattcaacgcaagctgagaaagaaaacagaaacacgaggcataaggccagtcagaaaatgcattacgaggggagttgaagtgactgtgggccagtgcctgggtcgtcatgtgcaaattttttcttcggttagactgccgcagcatgcagcaactctgccggccctatataactagtgcttcatcttcttgtcattcttgtctctttaccaacacaccggtactctttcaccatgggtaaggaaaagacacacgtatcgcgaccccgactcaactccaacatggacgcagacctgtacggatacaaatgggctcgagataatgtcggacagtcgggtgcgacgatctacagactctatggaaaaccggacgcccccgagctctttcttaaacacggcaagggtagcgttgcaaacgacgtaaccgacgaaatggtccgtctgaattggctaactgagttcatgccactccccaccatcaagcacttcatccgtacacctgacgatgcgtggctgttgactacggccatccccggtaagaccgcttttcaggtcctcgaggaataccctgactcgggcgagaacatcgtggatgccttggctgtgtttttgcgccgccttcactctattccggtctgcaactgccctttcaacagcgaccgtgtttttaggcttgcccaggcacaatcacgcatgaacaatggtctagtcgacgctagtgatttcgatgacgagcgcaacggctggccggtggaacaagtgtggaaagagatgcataagctcctgcccttttccccagactctgtcgtgacgcatggtgatttctcgcttgacaacctcatctttgacgagggcaagctcattggctgcattgacgtcggccgggttggcatcgccgatcgctaccaagatcttgcgatcctctggaattgtctgggcgagttctcccctagcctccagaagcgtctgttccagaaatatgggatcg

SEQ ID NO: 57 - DNA, 4576 bp, synthetic construct
  source 1..4576: mol_type = other DNA
tgcagagccttgcaaatgatgaaagaccaatggaattgatcattgattattgatgatgcatgatgaaagagatagaaacagatgcaagatgggatggcgcgatgatcaaatgataatgaacgttcaacccttcaaaattgaaactctcaggctgagcggctgagcaagctctgagaatgtgggtcttcgaagactttcgcttgagcatggtgcatgtgcaaagagatggaatgtggaattgttgtaggtaggaacacagcccggtagagcggcgcagtggctcagcgaagctgggagaacgactgaaccggtcttgagattcatcatctcagcgtgcgtcagcgcgtcagcttcagcgtttgagaatggcacggactgacctgtcgtacatcccaaggaggcccgtgcgctatactcgccttgtggcctaatctgcgatcaacccatcctcaacgaaagcgcaagtagcgactaagcacactatctttcgggtcggtgcggtcacagtatcggcatctctgtctttagctacgatggtgtgcgtgtaactgatcagtacacccgctgtatcaaaactctatcttcaatccgctaagaatcgtcaccatcagtacatcagtacatcagtgggctaagatctaatggtgtcgttcgacggccgcgggcactagccacgagccaagagcggtacagttgctgcgaaatggtgggcagcctgacaggttcagtttgaataggatgaaaacgccatgaagaacagagaagctggcaattgacgatagtggggcgagcgcacgctgcttgctggtccgagcgtaggacgaacgacaaaccatgggcggggccaccaggccccagggagggcgtcactggttggatgtcgtctgttaggctagagctcaggcgctcagggcctctggcccaagcctcggacgcaagcctctgacgagcgagcgcgcgctggggcgggtctgcgcaggaacggcaggactgccgagttggttgaatattgaatggttggatgattggtttgctgggtttggttttgacacgcacggcacaggacaagtgagtttggaggttggatttgcgcaggtagaaagggcgctcggcctcagggcctcagcgtcagcagacgagctcgccagtccaggtcagtacccagtgttcgttacttcccaccgtccagagtttgctgctgcctctcagcttgattcgtgtcggagaagtagaaatggtcacagcgtaccacacactgtccccatgcctgcgtcctgctccacgagtgtttagccacaaaaatttatggacaaccttactgagcctgtgctggggggtgctttagcaccagcactggcgccatggcgtcaaggttaattccactgtcattcgacaaccttcaactgatgggggcaactgggcacaaaaccttggatatataaccaactccaactcccacggttttttaccttttgctcttctccccaggactcactacttctactcctctattcatcttcaccaaaatgaaagcttccatgctggaggacttgaacaaattcagcgtcaaagagatcgacatcccgtcccccaaaaaggatgaggtcgtcgtgaaggtgatggcggcaggcacgtgtggatccgattcgcataaaatgattagcggatggaaatatggctatcccgcggtgatgggacacgaattttctggaattgtgacacaactgggagaaaacgtgtccaacgtcagcgtcggtcaacacgtcgccgtggctcccttcattccctgcttcaagtgtcattattgtcaaatcggactcttccagatgtgtgaaaattattccatgctcggtcagcaaaaatttggaggtttcgagcaatacgtttccgtcccggcacgtaacgttctggacatcggcaagatgtcgttcgaggaaggtgcccttattgaaccgatggcagttgcggcccacgctgttatgggaattaaaccggagctgggtgatacagttgcggtcttcggcctcggtacagtcggagatcttgttgtccgtcttcttatttcctcgggagcgacaaacgtcattggcattgacattgacgaccagaagcttgaaaagggactggatgagggttgcacacacgtgatcaactctgccaaagagtctcttgaagaaaagatcatggaatacaccgacggtctgggtgtcgatatttccatggaatgcgccggcagcaaaatcactgaggagcaaacactgctcgttacgaaacgccgtggaaaggttggatttgtcggtattgcttatagcgacgttctgctccatcagaaagcatttgagaacatcttccgccacgagcttacggtgactggattttggaattcctattccgcaccatttcctggacgcgagtggaccaactcgatccaattggttaatcgtggtcgtatcaagatcaaagatctcattactcatcgatttgagcttgaagacatgcaaaaagcattcaatatgatcaccactcgttcggaatcgtttaataaggtcatgtttttccccaacggcatcaattaacacggatcaacaaaaatgtgcgccagctttgttgtgtgcccttttcctctagcggatcctatccacatttcgtgaatgaaccgattaagctctgacgagatttccttgttttctgtagatacctcttgtagaggtgtcaaagttatgttgtgatcgagagagttacctgcaaggtattatgcaagcggcttgatgaggacactcaactacgtgtgagtaggagtgcgttgctcagcagttgacgcgtgagccgcttgagcagcttgataaaggtcctaatcgtcttccagctgttggcagacgacaatgtgctgtagtagtaggataggcccgtaaaagtgtagaagcaataggttgagactgactgtaatgggtacttgcgttcaaagactgaaagtccaaaggattgctcaaaggcccctgaggtctgagcctctgagcgcgctcttcgtcaaaattcgccggggccatcggtcatcctctcgagggcagcatcttcctgcttgaagactgagtccgtctcagataacttcgtataatgtatgctatacgaagttatcctgcaggagctcagaccttgcatgttagccttgaccttgcctctatgaccactaattcgcacaagattgcacgttaccattgtcatcttgccatgtatccaatgtttcctgtttgccatagtacgtagtagatacatcgatcatcgatgcagatgacgcagatggcattggttcgctttgccctatgcatgcatcatgcatcatgcatcatgcgtcatgcgtcactatccatattaatcattgccctctgtactaggccatgacacctgcagacccttccccagggatgcttcttgtaatagccaatatactacacaactttaccgattacgatcgagatcgatctcactatagtttgtcgaacttcgatgcacatcgagggtgcggaaaaaagctgacggaagcggaagtgggtgaattggttaatttagttagattggcagggttgttcccaagattcaacgcaagctgagaaagaaaacagaaacacgaggcataaggccagtcagaaaatgcattacgaggggagttgaagtgactgtgggccagtgcctgggtcgtcatgtgcaaattttttcttcggttagactgccgcagcatgcagcaactctgccggccctatataactagtgcttcatcttcttgtcattcttgtctctttaccaacacaccggtactctttcaccatgggtaaggaaaagacacacgtatcgcgaccccgactcaactccaacatggacgcagacctgtacggatacaaatgggctcgagataatgtcggacagtcgggtgcgacgatctacagactctatggaaaaccggacgcccccgagctctttcttaaacacggcaagggtagcgttgcaaacgacgtaaccgacgaaatggtccgtctgaattggctaactgagttcatgccactccccaccatcaagcacttcatccgtacacctgacgatgcgtggctgttgactacggccatccccggtaagaccgcttttcaggtcctcgaggaataccctgactcgggcgagaacatcgtggatgccttggctgtgtttttgcgccgccttcactctattccggtctgcaactgccctttcaacagcgaccgtgtttttaggcttgcccaggcacaatcacgcatgaacaatggtctagtcgacgctagtgatttcgatgacgagcgcaacggctggccggtggaacaagtgtggaaagagatgcataagctcctgcccttttccccagactctgtcgtgacgcatggtgatttctcgcttgacaacctcatctttgacgagggcaagctcattggctgcattgacgtcggccgggttggcatcgccgatcgctaccaagatcttgcgatcctctggaattgtctgggcgagttctcccctagcctccagaagcgtctgttccagaaatatgggatcg

SEQ ID NO: 58 - DNA, 4645 bp, synthetic construct
  source 1..4645: mol_type = other DNA
tgcagagccttgcaaatgatgaaagaccaatggaattgatcattgattattgatgatgcatgatgaaagagatagaaacagatgcaagatgggatggcgcgatgatcaaatgataatgaacgttcaacccttcaaaattgaaactctcaggctgagcggctgagcaagctctgagaatgtgggtcttcgaagactttcgcttgagcatggtgcatgtgcaaagagatggaatgtggaattgttgtaggtaggaacacagcccggtagagcggcgcagtggctcagcgaagctgggagaacgactgaaccggtcttgagattcatcatctcagcgtgcgtcagcgcgtcagcttcagcgtttgagaatggcacggactgacctgtcgtacatcccaaggaggcccgtgcgctatactcgccttgtggcctaatctgcgatcaacccatcctcaacgaaagcgcaagtagcgactaagcacactatctttcgggtcggtgcggtcacagtatcggcatctctgtctttagctacgatggtgtgcgtgtaactgatcagtacacccgctgtatcaaaactctatcttcaatccgctaagaatcgtcaccatcagtacatcagtacatcagtgggctaagatctaatggtgtcgttcgacggccgcgggcactagccacgagccaagagcggtacagttgctgcgaaatggtgggcagcctgacaggttcagtttgaataggatgaaaacgccatgaagaacagagaagctggcaattgacgatagtggggcgagcgcacgctgcttgctggtccgagcgtaggacgaacgacaaaccatgggcggggccaccaggccccagggagggcgtcactggttggatgtcgtctgttaggctagagctcaggcgctcagggcctctggcccaagcctcggacgcaagcctctgacgagcgagcgcgcgctggggcgggtctgcgcaggaacggcaggactgccgagttggttgaatattgaatggttggatgattggtttgctgggtttggttttgacacgcacggcacaggacaagtgagtttggaggttggatttgcgcaggtagaaagggcgctcggcctcagggcctcagcgtcagcagacgagctcgccagtccaggtcagtacccagtgttcgttacttcccaccgtccagagtttgctgctgcctctcagcttgattcgtgtcggagaagtagaaatggtcacagcgtaccacacactgtccccatgcctgcgtcctgctccacgagtgtttagccacaaaaatttatggacaaccttactgagcctgtgctggggggtgctttagcaccagcactggcgccatggcgtcaaggttaattccactgtcattcgacaaccttcaactgatgggggcaactgggcacaaaaccttggatatataaccaactccaactcccacggttttttaccttttgctcttctccccaggactcactacttctactcctctattcatcttcaccaaaatgtgagacctaatatcactgctgtacagacaagactgtgtatattaggtctcaatgaaggctctcaatttgtacggtatccaggacctccgctttgaggaaacacccgctccctctatcgaacatgatgacgatatcattatcaaagtcaaggctgtcggaatctgcggatccgatttgtcgcgttataagaaactgggaccttatgtccctggaatgacttttggacacgaattcgcgggagaggtcgtcaaaattggtcgttccgtgacgggattttctatcggtgatcgtgtcgctgcttgccctacttatacttgcggccagtgccgttactgtcaactcggcgagccgacacgatgtgagcgactgtctgtgatcggcgcacgccacccaggtgcatacgcagaatacgtcaaacttcccgcgaagcatgtcatccccttgcccaacgttgttaactatgacgaggccgccctcattgaaccggcttcggttgttgcgcacggcttttatcgtactaacattaagccaggtgcaagcgtcgctattatgggcgttggctcgatcggtctgctcgccgtccaatgggcaaaaatcttcggtgcgacaacggtctttgccattgatattgacgaacagaaacttaacgtcgctaatcaacttggagcagatgtcttgatctccagcctccaacgacccgcacacaagcaaatccttgaatataccaacggaatcggtgttgacgtggctgtggagtctgctggtacaccttctacctccgcccaggtgtttgcgctgccgaaaaaaggtggtgaagttgtctttcttggtattccttatgccgatgtccagattgaacgattttacttcgaaaaaattgttcgtaatgaactgcacgtttacggatcttggaatgcactctcctccccattcccgggtaaagagtgggccacgactatccattatatgtcgtccggacaattgaatgtcgcgcccatgatttcctaccgactccctctcgctaagggccccgagacgttccagcagatcgcaaagggtgaactcaagcccacaaaagtccttttctatcctgagaagttgtctgagcgcaagtaacacggatcaacaaaaatgtgcgccagctttgttgtgtgcccttttcctctagcggatcctatccacatttcgtgaatgaaccgattaagctctgacgagatttccttgttttctgtagatacctcttgtagaggtgtcaaagttatgttgtgatcgagagagttacctgcaaggtattatgcaagcggcttgatgaggacactcaactacgtgtgagtaggagtgcgttgctcagcagttgacgcgtgagccgcttgagcagcttgataaaggtcctaatcgtcttccagctgttggcagacgacaatgtgctgtagtagtaggataggcccgtaaaagtgtagaagcaataggttgagactgactgtaatgggtacttgcgttcaaagactgaaagtccaaaggattgctcaaaggcccctgaggtctgagcctctgagcgcgctcttcgtcaaaattcgccggggccatcggtcatcctctcgagggcagcatcttcctgcttgaagactgagtccgtctcagataacttcgtataatgtatgctatacgaagttatcctgcaggagctcagaccttgcatgttagccttgaccttgcctctatgaccactaattcgcacaagattgcacgttaccattgtcatcttgccatgtatccaatgtttcctgtttgccatagtacgtagtagatacatcgatcatcgatgcagatgacgcagatggcattggttcgctttgccctatgcatgcatcatgcatcatgcatcatgcgtcatgcgtcactatccatattaatcattgccctctgtactaggccatgacacctgcagacccttccccagggatgcttcttgtaatagccaatatactacacaactttaccgattacgatcgagatcgatctcactatagtttgtcgaacttcgatgcacatcgagggtgcggaaaaaagctgacggaagcggaagtgggtgaattggttaatttagttagattggcagggttgttcccaagattcaacgcaagctgagaaagaaaacagaaacacgaggcataaggccagtcagaaaatgcattacgaggggagttgaagtgactgtgggccagtgcctgggtcgtcatgtgcaaattttttcttcggttagactgccgcagcatgcagcaactctgccggccctatataactagtgcttcatcttcttgtcattcttgtctctttaccaacacaccggtactctttcaccatgggtaaggaaaagacacacgtatcgcgaccccgactcaactccaacatggacgcagacctgtacggatacaaatgggctcgagataatgtcggacagtcgggtgcgacgatctacagactctatggaaaaccggacgcccccgagctctttcttaaacacggcaagggtagcgttgcaaacgacgtaaccgacgaaatggtccgtctgaattggctaactgagttcatgccactccccaccatcaagcacttcatccgtacacctgacgatgcgtggctgttgactacggccatccccggtaagaccgcttttcaggtcctcgaggaataccctgactcgggcgagaacatcgtggatgccttggctgtgtttttgcgccgccttcactctattccggtctgcaactgccctttcaacagcgaccgtgtttttaggcttgcccaggcacaatcacgcatgaacaatggtctagtcgacgctagtgatttcgatgacgagcgcaacggctggccggtggaacaagtgtggaaagagatgcataagctcctgcccttttccccagactctgtcgtgacgcatggtgatttctcgcttgacaacctcatctttgacgagggcaagctcattggctgcattgacgtcggccgggttggcatcgccgatcgctaccaagatcttgcgatcctctggaattgtctgggcgagttctcccctagcctccagaagcgtctgttccagaaatatgggatcg

SEQ ID NO: 59 - DNA, 4636 bp, synthetic construct
  source 1..4636: mol_type = other DNA
tgcagagccttgcaaatgatgaaagaccaatggaattgatcattgattattgatgatgcatgatgaaagagatagaaacagatgcaagatgggatggcgcgatgatcaaatgataatgaacgttcaacccttcaaaattgaaactctcaggctgagcggctgagcaagctctgagaatgtgggtcttcgaagactttcgcttgagcatggtgcatgtgcaaagagatggaatgtggaattgttgtaggtaggaacacagcccggtagagcggcgcagtggctcagcgaagctgggagaacgactgaaccggtcttgagattcatcatctcagcgtgcgtcagcgcgtcagcttcagcgtttgagaatggcacggactgacctgtcgtacatcccaaggaggcccgtgcgctatactcgccttgtggcctaatctgcgatcaacccatcctcaacgaaagcgcaagtagcgactaagcacactatctttcgggtcggtgcggtcacagtatcggcatctctgtctttagctacgatggtgtgcgtgtaactgatcagtacacccgctgtatcaaaactctatcttcaatccgctaagaatcgtcaccatcagtacatcagtacatcagtgggctaagatctaatggtgtcgttcgacggccgcgggcactagccacgagccaagagcggtacagttgctgcgaaatggtgggcagcctgacaggttcagtttgaataggatgaaaacgccatgaagaacagagaagctggcaattgacgatagtggggcgagcgcacgctgcttgctggtccgagcgtaggacgaacgacaaaccatgggcggggccaccaggccccagggagggcgtcactggttggatgtcgtctgttaggctagagctcaggcgctcagggcctctggcccaagcctcggacgcaagcctctgacgagcgagcgcgcgctggggcgggtctgcgcaggaacggcaggactgccgagttggttgaatattgaatggttggatgattggtttgctgggtttggttttgacacgcacggcacaggacaagtgagtttggaggttggatttgcgcaggtagaaagggcgctcggcctcagggcctcagcgtcagcagacgagctcgccagtccaggtcagtacccagtgttcgttacttcccaccgtccagagtttgctgctgcctctcagcttgattcgtgtcggagaagtagaaatggtcacagcgtaccacacactgtccccatgcctgcgtcctgctccacgagtgtttagccacaaaaatttatggacaaccttactgagcctgtgctggggggtgctttagcaccagcactggcgccatggcgtcaaggttaattccactgtcattcgacaaccttcaactgatgggggcaactgggcacaaaaccttggatatataaccaactccaactcccacggttttttaccttttgctcttctccccaggactcactacttctactcctctattcatcttcaccaaaatgtgagacctaatatcactgctgtacagacaagactgtgtatattaggtctcaatgaaagtccttagcctgcataagcctggcgatattcgatttgaggacgctccaatgcctgagccaggagagggcgaagtgctgctgaaagttatggcatgcggcgtctgttcgtcggacgaggctcgaattttcaaggacggtgcccatattatgccaattgttcctggccacgagttctgtggccaagtggtgaaaacgggagcaggagtggacgaaagcctcatcggccgaaaagcgagcgtcttcccaatgcttccctgtttcgaatgcccttcttgtaaacgaggtgactacgcaacctgttctaactataaatactatggttcccgcaacgatggtggaatgggagaataccgagcaatcaaggcgtggaacctgaaccttctggatgattccgtcgattattgcgtcggcgcactgtccgagccatccgcggttggccatcacgccactgaagtgggaggagtgaaagccggagacaaggttttcgtcattggtagcggaaccatcggacttttgatcggcttcttcgctcaggctaagggtgcagaggtttggatcggtgcgcgtcgtaaagagagcaacgatttcgcggcgagcctgggttttaaaacgatcgacaccaataataccgaagacgaggttgcaaaggccacggatggtaacggcatggatgttgtcttcgaagcagttggtagcaataagtgtcttattgaagctattggatctgtcacggcgggaggcacacttgtcaccgtgggcaatcctgtgggagacatgaatcttccccgagatgtgtactggcgcatcctccgaaagcaactcacggtccgaggtacttggaactctagctactctgacaaggccaatgactggcacgaagtggccgcgttgatgaaagaaaaaaaaatcccgttcgaaaaactcatcacccgtaagtacaaactttctcaatgcgatgaggccttcgattttttccgtgaccactctattcagaagtcccgcgtgatgtttgttatgcacgaaaaagaatccgaagcttacaacggataacacggatcaacaaaaatgtgcgccagctttgttgtgtgcccttttcctctagcggatcctatccacatttcgtgaatgaaccgattaagctctgacgagatttccttgttttctgtagatacctcttgtagaggtgtcaaagttatgttgtgatcgagagagttacctgcaaggtattatgcaagcggcttgatgaggacactcaactacgtgtgagtaggagtgcgttgctcagcagttgacgcgtgagccgcttgagcagcttgataaaggtcctaatcgtcttccagctgttggcagacgacaatgtgctgtagtagtaggataggcccgtaaaagtgtagaagcaataggttgagactgactgtaatgggtacttgcgttcaaagactgaaagtccaaaggattgctcaaaggcccctgaggtctgagcctctgagcgcgctcttcgtcaaaattcgccggggccatcggtcatcctctcgagggcagcatcttcctgcttgaagactgagtccgtctcagataacttcgtataatgtatgctatacgaagttatcctgcaggagctcagaccttgcatgttagccttgaccttgcctctatgaccactaattcgcacaagattgcacgttaccattgtcatcttgccatgtatccaatgtttcctgtttgccatagtacgtagtagatacatcgatcatcgatgcagatgacgcagatggcattggttcgctttgccctatgcatgcatcatgcatcatgcatcatgcgtcatgcgtcactatccatattaatcattgccctctgtactaggccatgacacctgcagacccttccccagggatgcttcttgtaatagccaatatactacacaactttaccgattacgatcgagatcgatctcactatagtttgtcgaacttcgatgcacatcgagggtgcggaaaaaagctgacggaagcggaagtgggtgaattggttaatttagttagattggcagggttgttcccaagattcaacgcaagctgagaaagaaaacagaaacacgaggcataaggccagtcagaaaatgcattacgaggggagttgaagtgactgtgggccagtgcctgggtcgtcatgtgcaaattttttcttcggttagactgccgcagcatgcagcaactctgccggccctatataactagtgcttcatcttcttgtcattcttgtctctttaccaacacaccggtactctttcaccatgggtaaggaaaagacacacgtatcgcgaccccgactcaactccaacatggacgcagacctgtacggatacaaatgggctcgagataatgtcggacagtcgggtgcgacgatctacagactctatggaaaaccggacgcccccgagctctttcttaaacacggcaagggtagcgttgcaaacgacgtaaccgacgaaatggtccgtctgaattggctaactgagttcatgccactccccaccatcaagcacttcatccgtacacctgacgatgcgtggctgttgactacggccatccccggtaagaccgcttttcaggtcctcgaggaataccctgactcgggcgagaacatcgtggatgccttggctgtgtttttgcgccgccttcactctattccggtctgcaactgccctttcaacagcgaccgtgtttttaggcttgcccaggcacaatcacgcatgaacaatggtctagtcgacgctagtgatttcgatgacgagcgcaacggctggccggtggaacaagtgtggaaagagatgcataagctcctgcccttttccccagactctgtcgtgacgcatggtgatttctcgcttgacaacctcatctttgacgagggcaagctcattggctgcattgacgtcggccgggttggcatcgccgatcgctaccaagatcttgcgatcctctggaattgtctgggcgagttctcccctagcctccagaagcgtctgttccagaaatatgggatcg

SEQ ID NO: 60 - DNA, 4591 bp, synthetic construct
  source 1..4591: mol_type = other DNA
tgcagagccttgcaaatgatgaaagaccaatggaattgatcattgattattgatgatgcatgatgaaagagatagaaacagatgcaagatgggatggcgcgatgatcaaatgataatgaacgttcaacccttcaaaattgaaactctcaggctgagcggctgagcaagctctgagaatgtgggtcttcgaagactttcgcttgagcatggtgcatgtgcaaagagatggaatgtggaattgttgtaggtaggaacacagcccggtagagcggcgcagtggctcagcgaagctgggagaacgactgaaccggtcttgagattcatcatctcagcgtgcgtcagcgcgtcagcttcagcgtttgagaatggcacggactgacctgtcgtacatcccaaggaggcccgtgcgctatactcgccttgtggcctaatctgcgatcaacccatcctcaacgaaagcgcaagtagcgactaagcacactatctttcgggtcggtgcggtcacagtatcggcatctctgtctttagctacgatggtgtgcgtgtaactgatcagtacacccgctgtatcaaaactctatcttcaatccgctaagaatcgtcaccatcagtacatcagtacatcagtgggctaagatctaatggtgtcgttcgacggccgcgggcactagccacgagccaagagcggtacagttgctgcgaaatggtgggcagcctgacaggttcagtttgaataggatgaaaacgccatgaagaacagagaagctggcaattgacgatagtggggcgagcgcacgctgcttgctggtccgagcgtaggacgaacgacaaaccatgggcggggccaccaggccccagggagggcgtcactggttggatgtcgtctgttaggctagagctcaggcgctcagggcctctggcccaagcctcggacgcaagcctctgacgagcgagcgcgcgctggggcgggtctgcgcaggaacggcaggactgccgagttggttgaatattgaatggttggatgattggtttgctgggtttggttttgacacgcacggcacaggacaagtgagtttggaggttggatttgcgcaggtagaaagggcgctcggcctcagggcctcagcgtcagcagacgagctcgccagtccaggtcagtacccagtgttcgttacttcccaccgtccagagtttgctgctgcctctcagcttgattcgtgtcggagaagtagaaatggtcacagcgtaccacacactgtccccatgcctgcgtcctgctccacgagtgtttagccacaaaaatttatggacaaccttactgagcctgtgctggggggtgctttagcaccagcactggcgccatggcgtcaaggttaattccactgtcattcgacaaccttcaactgatgggggcaactgggcacaaaaccttggatatataaccaactccaactcccacggttttttaccttttgctcttctccccaggactcactacttctactcctctattcatcttcaccaaaatgtgagacctaatatcactgctgtacagacaagactgtgtatattaggtctcaatggtcaacatgatgaaagccctcgtgtttactgcgccccatacgttcgagtatcgtgacgttccccgacccgaacccgcccccgacgaggtcctggttgaggtgaaagcatgcgcaatttgtggttctgatgttcacggtagctcgggcgaaaacggtcgacgcattcctcccttggtgatgggccatgaggcaagcggcactatcgcacaattgggcgaagctgtgcagtcgtgggcagtgggagatcgcgttacatttgactctactgagtactgcggctactgttggttttgcacgcacggtatgcacaatttgtgcgcccagcgacgtatcgtgggcgttgcgtgcacagagtaccgtaaaaatggtgcaatggctcaatacattgcagtgaaagcccgtaccctttatgctttgccgccggcggtctcctttgaacagggttgccttgtcgaaccctttgctgtgggtatgcatgctgtcttgcgatctggactggcagcgggacagacggccgctgtgattggagatggaacaatcggtctgatgactcttattgcggccaagagccagggagcacaagtctgtatcagcggacaccacacccgtcccatgcagctcgcagcccagctcggagccctggattgtgcccaactgccccagctgacagctgagcgaggtgcggacgttgtttacgacgctgttggctctcaatccagctttacgcaagcgatggagcttgtccgtaagggaggccgaattatggttatcggcaatcatgcacgcacgatcgattttcctttgcaacgttgtatcacggaacagatcgacgttcagttttcgtacagctctgccggtgagtatcctgtttgtcttcaagccattgctgagggacgcgcagatttgacaggactgtggcaatctttcccactggctgagggcgctcaagttttcgaccgcctggttcaccgagatgagtccctgacgaaagccgttttgatcccataacacggatcaacaaaaatgtgcgccagctttgttgtgtgcccttttcctctagcggatcctatccacatttcgtgaatgaaccgattaagctctgacgagatttccttgttttctgtagatacctcttgtagaggtgtcaaagttatgttgtgatcgagagagttacctgcaaggtattatgcaagcggcttgatgaggacactcaactacgtgtgagtaggagtgcgttgctcagcagttgacgcgtgagccgcttgagcagcttgataaaggtcctaatcgtcttccagctgttggcagacgacaatgtgctgtagtagtaggataggcccgtaaaagtgtagaagcaataggttgagactgactgtaatgggtacttgcgttcaaagactgaaagtccaaaggattgctcaaaggcccctgaggtctgagcctctgagcgcgctcttcgtcaaaattcgccggggccatcggtcatcctctcgagggcagcatcttcctgcttgaagactgagtccgtctcagataacttcgtataatgtatgctatacgaagttatcctgcaggagctcagaccttgcatgttagccttgaccttgcctctatgaccactaattcgcacaagattgcacgttaccattgtcatcttgccatgtatccaatgtttcctgtttgccatagtacgtagtagatacatcgatcatcgatgcagatgacgcagatggcattggttcgctttgccctatgcatgcatcatgcatcatgcatcatgcgtcatgcgtcactatccatattaatcattgccctctgtactaggccatgacacctgcagacccttccccagggatgcttcttgtaatagccaatatactacacaactttaccgattacgatcgagatcgatctcactatagtttgtcgaacttcgatgcacatcgagggtgcggaaaaaagctgacggaagcggaagtgggtgaattggttaatttagttagattggcagggttgttcccaagattcaacgcaagctgagaaagaaaacagaaacacgaggcataaggccagtcagaaaatgcattacgaggggagttgaagtgactgtgggccagtgcctgggtcgtcatgtgcaaattttttcttcggttagactgccgcagcatgcagcaactctgccggccctatataactagtgcttcatcttcttgtcattcttgtctctttaccaacacaccggtactctttcaccatgggtaaggaaaagacacacgtatcgcgaccccgactcaactccaacatggacgcagacctgtacggatacaaatgggctcgagataatgtcggacagtcgggtgcgacgatctacagactctatggaaaaccggacgcccccgagctctttcttaaacacggcaagggtagcgttgcaaacgacgtaaccgacgaaatggtccgtctgaattggctaactgagttcatgccactccccaccatcaagcacttcatccgtacacctgacgatgcgtggctgttgactacggccatccccggtaagaccgcttttcaggtcctcgaggaataccctgactcgggcgagaacatcgtggatgccttggctgtgtttttgcgccgccttcactctattccggtctgcaactgccctttcaacagcgaccgtgtttttaggcttgcccaggcacaatcacgcatgaacaatggtctagtcgacgctagtgatttcgatgacgagcgcaacggctggccggtggaacaagtgtggaaagagatgcataagctcctgcccttttccccagactctgtcgtgacgcatggtgatttctcgcttgacaacctcatctttgacgagggcaagctcattggctgcattgacgtcggccgggttggcatcgccgatcgctaccaagatcttgcgatcctctggaattgtctgggcgagttctcccctagcctccagaagcgtctgttccagaaatatgggatcg

SEQ ID NO: 61 - DNA, 4654 bp, synthetic construct
  misc_feature 1..4654: note = synthetic
  source 1..4654: mol_type = other DNA
tgcagagccttgcaaatgatgaaagaccaatggaattgatcattgattattgatgatgcatgatgaaagagatagaaacagatgcaagatgggatggcgcgatgatcaaatgataatgaacgttcaacccttcaaaattgaaactctcaggctgagcggctgagcaagctctgagaatgtgggtcttcgaagactttcgcttgagcatggtgcatgtgcaaagagatggaatgtggaattgttgtaggtaggaacacagcccggtagagcggcgcagtggctcagcgaagctgggagaacgactgaaccggtcttgagattcatcatctcagcgtgcgtcagcgcgtcagcttcagcgtttgagaatggcacggactgacctgtcgtacatcccaaggaggcccgtgcgctatactcgccttgtggcctaatctgcgatcaacccatcctcaacgaaagcgcaagtagcgactaagcacactatctttcgggtcggtgcggtcacagtatcggcatctctgtctttagctacgatggtgtgcgtgtaactgatcagtacacccgctgtatcaaaactctatcttcaatccgctaagaatcgtcaccatcagtacatcagtacatcagtgggctaagatctaatggtgtcgttcgacggccgcgggcactagccacgagccaagagcggtacagttgctgcgaaatggtgggcagcctgacaggttcagtttgaataggatgaaaacgccatgaagaacagagaagctggcaattgacgatagtggggcgagcgcacgctgcttgctggtccgagcgtaggacgaacgacaaaccatgggcggggccaccaggccccagggagggcgtcactggttggatgtcgtctgttaggctagagctcaggcgctcagggcctctggcccaagcctcggacgcaagcctctgacgagcgagcgcgcgctggggcgggtctgcgcaggaacggcaggactgccgagttggttgaatattgaatggttggatgattggtttgctgggtttggttttgacacgcacggcacaggacaagtgagtttggaggttggatttgcgcaggtagaaagggcgctcggcctcagggcctcagcgtcagcagacgagctcgccagtccaggtcagtacccagtgttcgttacttcccaccgtccagagtttgctgctgcctctcagcttgattcgtgtcggagaagtagaaatggtcacagcgtaccacacactgtccccatgcctgcgtcctgctccacgagtgtttagccacaaaaatttatggacaaccttactgagcctgtgctggggggtgctttagcaccagcactggcgccatggcgtcaaggttaattccactgtcattcgacaaccttcaactgatgggggcaactgggcacaaaaccttggatatataaccaactccaactcccacggttttttaccttttgctcttctccccaggactcactacttctactcctctattcatcttcaccaaaatgtgagacctaatatcactgctgtacagacaagactgtgtatattaggtctcaatgaaggcctatgttttggatggtattggccagctgaatcaacatgagtatgtcctccgagacttgcagcctggagaagccctcgttcaagtggctgcggctggtatctgcggtagcgacctgccccgcatctttgagactggaacttatcattttccaactatcccaggccatgaattcgcaggtgttgtcaaagaactttatgctgatgccgacgaagaaatgctccgacaatggatgggtaagcgcgttgcggtgtttccactgattccctgtcgaacctgtcgaagctgcgcgaatcatcagtacgagatgtgttctaactataattacctcggctcgcgtacggacggaggcttcgctgaatactgtatcgtgcctgtttggaacttgttgcagttgccggacgaggttagcttcgcacaggccgctatgatggaaccggcagctgtggcattgcatgcaatccgacgtggcggcctgcaccccgaccaccccgagaccggtatcggcaagcgtgttctggttatgggacttggcactattggcggattgatcgcccagtggcttagccaatgtggcgttacggagctcaccgccactggtcaccacgccccccaggaagagcttatgcaccgatatgctaacgagaactaccgattcattaatactaatcaaactgcttggaccgatgacgaaaacacctacgatcttatttttgactgcattaatgacagcgaatccgttcagcaggcgttgcgctacgtcaaacccggtggtcagattgttgctgttggcaacccgaaaaaagatcttactcttcaaaaggacatctattggaaactcctgcgaaaacaagtgtgtatgaccggaacatggaactcgagcttcagccatgattcgaacgatgactggcagatcctccttcgataccttcaggagcaaaagctgcatccgcaggcacttatcacacatcgccttccgtttgcccaacttcccaagggcttggagatcatgcgtcttcgtgaagagttttacaacaaaattatgatcgacttgactgtctgttcttaacacggatcaacaaaaatgtgcgccagctttgttgtgtgcccttttcctctagcggatcctatccacatttcgtgaatgaaccgattaagctctgacgagatttccttgttttctgtagatacctcttgtagaggtgtcaaagttatgttgtgatcgagagagttacctgcaaggtattatgcaagcggcttgatgaggacactcaactacgtgtgagtaggagtgcgttgctcagcagttgacgcgtgagccgcttgagcagcttgataaaggtcctaatcgtcttccagctgttggcagacgacaatgtgctgtagtagtaggataggcccgtaaaagtgtagaagcaataggttgagactgactgtaatgggtacttgcgttcaaagactgaaagtccaaaggattgctcaaaggcccctgaggtctgagcctctgagcgcgctcttcgtcaaaattcgccggggccatcggtcatcctctcgagggcagcatcttcctgcttgaagactgagtccgtctcagataacttcgtataatgtatgctatacgaagttatcctgcaggagctcagaccttgcatgttagccttgaccttgcctctatgaccactaattcgcacaagattgcacgttaccattgtcatcttgccatgtatccaatgtttcctgtttgccatagtacgtagtagatacatcgatcatcgatgcagatgacgcagatggcattggttcgctttgccctatgcatgcatcatgcatcatgcatcatgcgtcatgcgtcactatccatattaatcattgccctctgtactaggccatgacacctgcagacccttccccagggatgcttcttgtaatagccaatatactacacaactttaccgattacgatcgagatcgatctcactatagtttgtcgaacttcgatgcacatcgagggtgcggaaaaaagctgacggaagcggaagtgggtgaattggttaatttagttagattggcagggttgttcccaagattcaacgcaagctgagaaagaaaacagaaacacgaggcataaggccagtcagaaaatgcattacgaggggagttgaagtgactgtgggccagtgcctgggtcgtcatgtgcaaattttttcttcggttagactgccgcagcatgcagcaactctgccggccctatataactagtgcttcatcttcttgtcattcttgtctctttaccaacacaccggtactctttcaccatgggtaaggaaaagacacacgtatcgcgaccccgactcaactccaacatggacgcagacctgtacggatacaaatgggctcgagataatgtcggacagtcgggtgcgacgatctacagactctatggaaaaccggacgcccccgagctctttcttaaacacggcaagggtagcgttgcaaacgacgtaaccgacgaaatggtccgtctgaattggctaactgagttcatgccactccccaccatcaagcacttcatccgtacacctgacgatgcgtggctgttgactacggccatccccggtaagaccgcttttcaggtcctcgaggaataccctgactcgggcgagaacatcgtggatgccttggctgtgtttttgcgccgccttcactctattccggtctgcaactgccctttcaacagcgaccgtgtttttaggcttgcccaggcacaatcacgcatgaacaatggtctagtcgacgctagtgatttcgatgacgagcgcaacggctggccggtggaacaagtgtggaaagagatgcataagctcctgcccttttccccagactctgtcgtgacgcatggtgatttctcgcttgacaacctcatctttgacgagggcaagctcattggctgcattgacgtcggccgggttggcatcgccgatcgctaccaagatcttgcgatcctctggaattgtctgggcgagttctcccctagcctccagaagcgtctgttccagaaatatgggatcg

SEQ ID NO: 62 - DNA, 4609 bp, synthetic construct
  source 1..4609: mol_type = other DNA
tgcagagccttgcaaatgatgaaagaccaatggaattgatcattgattattgatgatgcatgatgaaagagatagaaacagatgcaagatgggatggcgcgatgatcaaatgataatgaacgttcaacccttcaaaattgaaactctcaggctgagcggctgagcaagctctgagaatgtgggtcttcgaagactttcgcttgagcatggtgcatgtgcaaagagatggaatgtggaattgttgtaggtaggaacacagcccggtagagcggcgcagtggctcagcgaagctgggagaacgactgaaccggtcttgagattcatcatctcagcgtgcgtcagcgcgtcagcttcagcgtttgagaatggcacggactgacctgtcgtacatcccaaggaggcccgtgcgctatactcgccttgtggcctaatctgcgatcaacccatcctcaacgaaagcgcaagtagcgactaagcacactatctttcgggtcggtgcggtcacagtatcggcatctctgtctttagctacgatggtgtgcgtgtaactgatcagtacacccgctgtatcaaaactctatcttcaatccgctaagaatcgtcaccatcagtacatcagtacatcagtgggctaagatctaatggtgtcgttcgacggccgcgggcactagccacgagccaagagcggtacagttgctgcgaaatggtgggcagcctgacaggttcagtttgaataggatgaaaacgccatgaagaacagagaagctggcaattgacgatagtggggcgagcgcacgctgcttgctggtccgagcgtaggacgaacgacaaaccatgggcggggccaccaggccccagggagggcgtcactggttggatgtcgtctgttaggctagagctcaggcgctcagggcctctggcccaagcctcggacgcaagcctctgacgagcgagcgcgcgctggggcgggtctgcgcaggaacggcaggactgccgagttggttgaatattgaatggttggatgattggtttgctgggtttggttttgacacgcacggcacaggacaagtgagtttggaggttggatttgcgcaggtagaaagggcgctcggcctcagggcctcagcgtcagcagacgagctcgccagtccaggtcagtacccagtgttcgttacttcccaccgtccagagtttgctgctgcctctcagcttgattcgtgtcggagaagtagaaatggtcacagcgtaccacacactgtccccatgcctgcgtcctgctccacgagtgtttagccacaaaaatttatggacaaccttactgagcctgtgctggggggtgctttagcaccagcactggcgccatggcgtcaaggttaattccactgtcattcgacaaccttcaactgatgggggcaactgggcacaaaaccttggatatataaccaactccaactcccacggttttttaccttttgctcttctccccaggactcactacttctactcctctattcatcttcaccaaaatgtgagacctaatatcactgctgtacagacaagactgtgtatattaggtctcaatgaaggccgtgacttacactcccgaccagggttttgcattggtcgaggttgagacaccccagcttggacctgacgaagttcttctccaggtggaggcttgtggcgtctgcggaagcgaccgtcaagtcgttgcaggcgaatcggttcctaccggtaccgccttccctctggtgatgggccacgagattgccggacgtatcgccgcgttgggcgaaactgtgacagattggcatgttggagactctgtgattgtccatcccttcgtggcatgtggtacgtgcgcaccctgtgttcacggccagcctaacttgtgcgtccgacaggtgtgtattggttatcaacgacctggaggatttgcagagcaagttgctgtcccggctcgtcaactggttcgacgtccagcagaattggcaccggccgccgcagcattggttgtggatgcgtttgccacgccataccacgcgatgcgagcggcgggtgttgagagcggccaaaccgttttgattattggaaccggcggacttggtctcgcggcacttatgctggccatgggcttccatgtcggccgtctgggcgcggtcacgcgacgccaagagggtattgcaatcgcggaggctcatggcgcgcagatggttgtcgtcacggaccaggatgagcgtacaattgcgcgccagcttcgccgctggtctggcgcatccggcattgacgtcgtcatcgatacggtcgctactgctgacactattacattggcagctgaaagcgttcgcccaggaggcactatcgctattgtcggaatgtcggccgacaccgccctctatcctgtcgctaagaccgttcgccgaggtctgacattcgttgcgagctacggatccgtccgagaggatgtcgagcagttggtcagctgggtggcagaaggtcgactggacccggttcgactcgtcgcgggagccctcccactccatgaagccgctcgtgcattcgccccggaccgacccgccggacgttgggttattgatccatctgaataacacggatcaacaaaaatgtgcgccagctttgttgtgtgcccttttcctctagcggatcctatccacatttcgtgaatgaaccgattaagctctgacgagatttccttgttttctgtagatacctcttgtagaggtgtcaaagttatgttgtgatcgagagagttacctgcaaggtattatgcaagcggcttgatgaggacactcaactacgtgtgagtaggagtgcgttgctcagcagttgacgcgtgagccgcttgagcagcttgataaaggtcctaatcgtcttccagctgttggcagacgacaatgtgctgtagtagtaggataggcccgtaaaagtgtagaagcaataggttgagactgactgtaatgggtacttgcgttcaaagactgaaagtccaaaggattgctcaaaggcccctgaggtctgagcctctgagcgcgctcttcgtcaaaattcgccggggccatcggtcatcctctcgagggcagcatcttcctgcttgaagactgagtccgtctcagataacttcgtataatgtatgctatacgaagttatcctgcaggagctcagaccttgcatgttagccttgaccttgcctctatgaccactaattcgcacaagattgcacgttaccattgtcatcttgccatgtatccaatgtttcctgtttgccatagtacgtagtagatacatcgatcatcgatgcagatgacgcagatggcattggttcgctttgccctatgcatgcatcatgcatcatgcatcatgcgtcatgcgtcactatccatattaatcattgccctctgtactaggccatgacacctgcagacccttccccagggatgcttcttgtaatagccaatatactacacaactttaccgattacgatcgagatcgatctcactatagtttgtcgaacttcgatgcacatcgagggtgcggaaaaaagctgacggaagcggaagtgggtgaattggttaatttagttagattggcagggttgttcccaagattcaacgcaagctgagaaagaaaacagaaacacgaggcataaggccagtcagaaaatgcattacgaggggagttgaagtgactgtgggccagtgcctgggtcgtcatgtgcaaattttttcttcggttagactgccgcagcatgcagcaactctgccggccctatataactagtgcttcatcttcttgtcattcttgtctctttaccaacacaccggtactctttcaccatgggtaaggaaaagacacacgtatcgcgaccccgactcaactccaacatggacgcagacctgtacggatacaaatgggctcgagataatgtcggacagtcgggtgcgacgatctacagactctatggaaaaccggacgcccccgagctctttcttaaacacggcaagggtagcgttgcaaacgacgtaaccgacgaaatggtccgtctgaattggctaactgagttcatgccactccccaccatcaagcacttcatccgtacacctgacgatgcgtggctgttgactacggccatccccggtaagaccgcttttcaggtcctcgaggaataccctgactcgggcgagaacatcgtggatgccttggctgtgtttttgcgccgccttcactctattccggtctgcaactgccctttcaacagcgaccgtgtttttaggcttgcccaggcacaatcacgcatgaacaatggtctagtcgacgctagtgatttcgatgacgagcgcaacggctggccggtggaacaagtgtggaaagagatgcataagctcctgcccttttccccagactctgtcgtgacgcatggtgatttctcgcttgacaacctcatctttgacgagggcaagctcattggctgcattgacgtcggccgggttggcatcgccgatcgctaccaagatcttgcgatcctctggaattgtctgggcgagttctcccctagcctccagaagcgtctgttccagaaatatgggatcg

SEQ ID NO: 63 - DNA, 4654 bp, synthetic construct
  source 1..4654: mol_type = other DNA
tgcagagccttgcaaatgatgaaagaccaatggaattgatcattgattattgatgatgcatgatgaaagagatagaaacagatgcaagatgggatggcgcgatgatcaaatgataatgaacgttcaacccttcaaaattgaaactctcaggctgagcggctgagcaagctctgagaatgtgggtcttcgaagactttcgcttgagcatggtgcatgtgcaaagagatggaatgtggaattgttgtaggtaggaacacagcccggtagagcggcgcagtggctcagcgaagctgggagaacgactgaaccggtcttgagattcatcatctcagcgtgcgtcagcgcgtcagcttcagcgtttgagaatggcacggactgacctgtcgtacatcccaaggaggcccgtgcgctatactcgccttgtggcctaatctgcgatcaacccatcctcaacgaaagcgcaagtagcgactaagcacactatctttcgggtcggtgcggtcacagtatcggcatctctgtctttagctacgatggtgtgcgtgtaactgatcagtacacccgctgtatcaaaactctatcttcaatccgctaagaatcgtcaccatcagtacatcagtacatcagtgggctaagatctaatggtgtcgttcgacggccgcgggcactagccacgagccaagagcggtacagttgctgcgaaatggtgggcagcctgacaggttcagtttgaataggatgaaaacgccatgaagaacagagaagctggcaattgacgatagtggggcgagcgcacgctgcttgctggtccgagcgtaggacgaacgacaaaccatgggcggggccaccaggccccagggagggcgtcactggttggatgtcgtctgttaggctagagctcaggcgctcagggcctctggcccaagcctcggacgcaagcctctgacgagcgagcgcgcgctggggcgggtctgcgcaggaacggcaggactgccgagttggttgaatattgaatggttggatgattggtttgctgggtttggttttgacacgcacggcacaggacaagtgagtttggaggttggatttgcgcaggtagaaagggcgctcggcctcagggcctcagcgtcagcagacgagctcgccagtccaggtcagtacccagtgttcgttacttcccaccgtccagagtttgctgctgcctctcagcttgattcgtgtcggagaagtagaaatggtcacagcgtaccacacactgtccccatgcctgcgtcctgctccacgagtgtttagccacaaaaatttatggacaaccttactgagcctgtgctggggggtgctttagcaccagcactggcgccatggcgtcaaggttaattccactgtcattcgacaaccttcaactgatgggggcaactgggcacaaaaccttggatatataaccaactccaactcccacggttttttaccttttgctcttctccccaggactcactacttctactcctctattcatcttcaccaaaatgtgagacctaatatcactgctgtacagacaagactgtgtatattaggtctcaatgaaaagcttgattaatatcccggaaaaaatgaaagccctcgttttgtatggtgttggtgatttgcgtgtcactgaagtggacgttccgaagctcgaaaaaggaacggtcctccttaaaattaaagcttgcggcatctgttcctccgacatgcctcgttgtttcgttactggcacttaccattttccgaccattccaggacacgagttctctggacaaatcgttgcggtgggtgatgatgttgatgaatccttgttgggaaagcgttcgtgcgttttccctatgcttccctgcaaacactgcaaagcttgcaagatggaggaatatgctcagtgtagcggctattcttacttcggctctcgccaagatggtgcctgggcggaatacctcgtggtcccggtgtggaacctggtgccctttgacgatacactcgattataaaactgcagccctgtgcgaaccagctgcggtctctatgcacgccgttaatattggagacattaaagaaggtcagaatgttgtgatcatcggaacgggtaccatcggattcatgattgctctctttgccaaagaacgtacgaaaacaggaaaggttgtgatcgcgggacgctcgaaaaataagctggaatacgcgaaaaagttgggcttcgatgtcgttgacacctcggttgacgatttgcctgcccaagtgaagaaaatcatcggtattgatggagctgacgtcacattcgaagcggtcggctccaatgaggccattgcctctgctattgaatctacgggcgctttgggttcgattgttcttgtcggtaatccttccactgatctcatcttgccaaagaatatttattggtccatcctccgaaagcaaattacagttaaaggttcctggaactcgtcttataactctcgcgttaatgactggaagaaagcgttggaggtgtttgagcatagcgacgtgaattttgcagacttgatcacacacacattcactatcgaagaaaacgagaaagctttttctgccatccgtaacactggagaattcactctcaaagtcatgtttaccttcgatgattaacacggatcaacaaaaatgtgcgccagctttgttgtgtgcccttttcctctagcggatcctatccacatttcgtgaatgaaccgattaagctctgacgagatttccttgttttctgtagatacctcttgtagaggtgtcaaagttatgttgtgatcgagagagttacctgcaaggtattatgcaagcggcttgatgaggacactcaactacgtgtgagtaggagtgcgttgctcagcagttgacgcgtgagccgcttgagcagcttgataaaggtcctaatcgtcttccagctgttggcagacgacaatgtgctgtagtagtaggataggcccgtaaaagtgtagaagcaataggttgagactgactgtaatgggtacttgcgttcaaagactgaaagtccaaaggattgctcaaaggcccctgaggtctgagcctctgagcgcgctcttcgtcaaaattcgccggggccatcggtcatcctctcgagggcagcatcttcctgcttgaagactgagtccgtctcagataacttcgtataatgtatgctatacgaagttatcctgcaggagctcagaccttgcatgttagccttgaccttgcctctatgaccactaattcgcacaagattgcacgttaccattgtcatcttgccatgtatccaatgtttcctgtttgccatagtacgtagtagatacatcgatcatcgatgcagatgacgcagatggcattggttcgctttgccctatgcatgcatcatgcatcatgcatcatgcgtcatgcgtcactatccatattaatcattgccctctgtactaggccatgacacctgcagacccttccccagggatgcttcttgtaatagccaatatactacacaactttaccgattacgatcgagatcgatctcactatagtttgtcgaacttcgatgcacatcgagggtgcggaaaaaagctgacggaagcggaagtgggtgaattggttaatttagttagattggcagggttgttcccaagattcaacgcaagctgagaaagaaaacagaaacacgaggcataaggccagtcagaaaatgcattacgaggggagttgaagtgactgtgggccagtgcctgggtcgtcatgtgcaaattttttcttcggttagactgccgcagcatgcagcaactctgccggccctatataactagtgcttcatcttcttgtcattcttgtctctttaccaacacaccggtactctttcaccatgggtaaggaaaagacacacgtatcgcgaccccgactcaactccaacatggacgcagacctgtacggatacaaatgggctcgagataatgtcggacagtcgggtgcgacgatctacagactctatggaaaaccggacgcccccgagctctttcttaaacacggcaagggtagcgttgcaaacgacgtaaccgacgaaatggtccgtctgaattggctaactgagttcatgccactccccaccatcaagcacttcatccgtacacctgacgatgcgtggctgttgactacggccatccccggtaagaccgcttttcaggtcctcgaggaataccctgactcgggcgagaacatcgtggatgccttggctgtgtttttgcgccgccttcactctattccggtctgcaactgccctttcaacagcgaccgtgtttttaggcttgcccaggcacaatcacgcatgaacaatggtctagtcgacgctagtgatttcgatgacgagcgcaacggctggccggtggaacaagtgtggaaagagatgcataagctcctgcccttttccccagactctgtcgtgacgcatggtgatttctcgcttgacaacctcatctttgacgagggcaagctcattggctgcattgacgtcggccgggttggcatcgccgatcgctaccaagatcttgcgatcctctggaattgtctgggcgagttctcccctagcctccagaagcgtctgttccagaaatatgggatcg

SEQ ID NO: 64 - DNA, 4627 bp, synthetic construct
  source 1..4627: mol_type = other DNA
tgcagagccttgcaaatgatgaaagaccaatggaattgatcattgattattgatgatgcatgatgaaagagatagaaacagatgcaagatgggatggcgcgatgatcaaatgataatgaacgttcaacccttcaaaattgaaactctcaggctgagcggctgagcaagctctgagaatgtgggtcttcgaagactttcgcttgagcatggtgcatgtgcaaagagatggaatgtggaattgttgtaggtaggaacacagcccggtagagcggcgcagtggctcagcgaagctgggagaacgactgaaccggtcttgagattcatcatctcagcgtgcgtcagcgcgtcagcttcagcgtttgagaatggcacggactgacctgtcgtacatcccaaggaggcccgtgcgctatactcgccttgtggcctaatctgcgatcaacccatcctcaacgaaagcgcaagtagcgactaagcacactatctttcgggtcggtgcggtcacagtatcggcatctctgtctttagctacgatggtgtgcgtgtaactgatcagtacacccgctgtatcaaaactctatcttcaatccgctaagaatcgtcaccatcagtacatcagtacatcagtgggctaagatctaatggtgtcgttcgacggccgcgggcactagccacgagccaagagcggtacagttgctgcgaaatggtgggcagcctgacaggttcagtttgaataggatgaaaacgccatgaagaacagagaagctggcaattgacgatagtggggcgagcgcacgctgcttgctggtccgagcgtaggacgaacgacaaaccatgggcggggccaccaggccccagggagggcgtcactggttggatgtcgtctgttaggctagagctcaggcgctcagggcctctggcccaagcctcggacgcaagcctctgacgagcgagcgcgcgctggggcgggtctgcgcaggaacggcaggactgccgagttggttgaatattgaatggttggatgattggtttgctgggtttggttttgacacgcacggcacaggacaagtgagtttggaggttggatttgcgcaggtagaaagggcgctcggcctcagggcctcagcgtcagcagacgagctcgccagtccaggtcagtacccagtgttcgttacttcccaccgtccagagtttgctgctgcctctcagcttgattcgtgtcggagaagtagaaatggtcacagcgtaccacacactgtccccatgcctgcgtcctgctccacgagtgtttagccacaaaaatttatggacaaccttactgagcctgtgctggggggtgctttagcaccagcactggcgccatggcgtcaaggttaattccactgtcattcgacaaccttcaactgatgggggcaactgggcacaaaaccttggatatataaccaactccaactcccacggttttttaccttttgctcttctccccaggactcactacttctactcctctattcatcttcaccaaaatgtgagacctaatatcactgctgtacagacaagactgtgtatattaggtctcaatgaaagctgtcgtcctgcatggtaaaaacgacatttgctatgaagaatggcctgaacccatcctgaaaacaggaacagttaagattcatgtcaaggcttgtggcatttgcggctctgacattcctcgcgttctcggagattctgcccattactacccgatcatcctcggccatgagttctccggttgtgtcactgaggtggctgatgacgttgacaagatccaggttggcgatcatgttgcaggagtcccccttctcccgtgcatgaaatgcgatgattgtcaacagggaaactattctcagtgtaaacattactcttttatcggcagccgcgagcaaggtggatttgcagattatgttgtgatcccagccgataacgtggttaaagtcgacccaactcttccttacgaacaggtcgcactcttcgagccttgtactgttgctttgcatgcactcaaagtctcctcgtataaaggaggaaaacgagtggcgatcctgggtggcggcacgattggtctttttgcactccagtgggctaaaatctatggcgcgtcccaagtcacagtcttcggtcgcagcaaggaacacttgaagatcgctgctgctctgggtgccgacacaactatttccactctggacgataattttatgacagaggctatgcgagtcacagagaaaaagggttttgactacatttacgagtccgccggttccacaatcaccatgaagcttgcttttgaactggcagccaaccacgcgaaaatctgtttcattggcacgcccacggaaaacctgactttcagccctaagctgtgggagaacatgaatcgaaaggagttccagcttatgggttcctggatgtcgtgttcggcgccgttccccggcgatgaatggaaggagacagcccatttctttaacaccggacaacttcgatatgtgcctgagatgtttttcgcacagtatcccatggacgatgttaaaaaagcgttcgagcagttccataacaagaataaagttaagggacgtatcctgctcaaaaacaagtaacacggatcaacaaaaatgtgcgccagctttgttgtgtgcccttttcctctagcggatcctatccacatttcgtgaatgaaccgattaagctctgacgagatttccttgttttctgtagatacctcttgtagaggtgtcaaagttatgttgtgatcgagagagttacctgcaaggtattatgcaagcggcttgatgaggacactcaactacgtgtgagtaggagtgcgttgctcagcagttgacgcgtgagccgcttgagcagcttgataaaggtcctaatcgtcttccagctgttggcagacgacaatgtgctgtagtagtaggataggcccgtaaaagtgtagaagcaataggttgagactgactgtaatgggtacttgcgttcaaagactgaaagtccaaaggattgctcaaaggcccctgaggtctgagcctctgagcgcgctcttcgtcaaaattcgccggggccatcggtcatcctctcgagggcagcatcttcctgcttgaagactgagtccgtctcagataacttcgtataatgtatgctatacgaagttatcctgcaggagctcagaccttgcatgttagccttgaccttgcctctatgaccactaattcgcacaagattgcacgttaccattgtcatcttgccatgtatccaatgtttcctgtttgccatagtacgtagtagatacatcgatcatcgatgcagatgacgcagatggcattggttcgctttgccctatgcatgcatcatgcatcatgcatcatgcgtcatgcgtcactatccatattaatcattgccctctgtactaggccatgacacctgcagacccttccccagggatgcttcttgtaatagccaatatactacacaactttaccgattacgatcgagatcgatctcactatagtttgtcgaacttcgatgcacatcgagggtgcggaaaaaagctgacggaagcggaagtgggtgaattggttaatttagttagattggcagggttgttcccaagattcaacgcaagctgagaaagaaaacagaaacacgaggcataaggccagtcagaaaatgcattacgaggggagttgaagtgactgtgggccagtgcctgggtcgtcatgtgcaaattttttcttcggttagactgccgcagcatgcagcaactctgccggccctatataactagtgcttcatcttcttgtcattcttgtctctttaccaacacaccggtactctttcaccatgggtaaggaaaagacacacgtatcgcgaccccgactcaactccaacatggacgcagacctgtacggatacaaatgggctcgagataatgtcggacagtcgggtgcgacgatctacagactctatggaaaaccggacgcccccgagctctttcttaaacacggcaagggtagcgttgcaaacgacgtaaccgacgaaatggtccgtctgaattggctaactgagttcatgccactccccaccatcaagcacttcatccgtacacctgacgatgcgtggctgttgactacggccatccccggtaagaccgcttttcaggtcctcgaggaataccctgactcgggcgagaacatcgtggatgccttggctgtgtttttgcgccgccttcactctattccggtctgcaactgccctttcaacagcgaccgtgtttttaggcttgcccaggcacaatcacgcatgaacaatggtctagtcgacgctagtgatttcgatgacgagcgcaacggctggccggtggaacaagtgtggaaagagatgcataagctcctgcccttttccccagactctgtcgtgacgcatggtgatttctcgcttgacaacctcatctttgacgagggcaagctcattggctgcattgacgtcggccgggttggcatcgccgatcgctaccaagatcttgcgatcctctggaattgtctgggcgagttctcccctagcctccagaagcgtctgttccagaaatatgggatcg

SEQ ID NO: 65 - DNA, 4594 bp, synthetic construct
  source 1..4594: mol_type = other DNA
tgcagagccttgcaaatgatgaaagaccaatggaattgatcattgattattgatgatgcatgatgaaagagatagaaacagatgcaagatgggatggcgcgatgatcaaatgataatgaacgttcaacccttcaaaattgaaactctcaggctgagcggctgagcaagctctgagaatgtgggtcttcgaagactttcgcttgagcatggtgcatgtgcaaagagatggaatgtggaattgttgtaggtaggaacacagcccggtagagcggcgcagtggctcagcgaagctgggagaacgactgaaccggtcttgagattcatcatctcagcgtgcgtcagcgcgtcagcttcagcgtttgagaatggcacggactgacctgtcgtacatcccaaggaggcccgtgcgctatactcgccttgtggcctaatctgcgatcaacccatcctcaacgaaagcgcaagtagcgactaagcacactatctttcgggtcggtgcggtcacagtatcggcatctctgtctttagctacgatggtgtgcgtgtaactgatcagtacacccgctgtatcaaaactctatcttcaatccgctaagaatcgtcaccatcagtacatcagtacatcagtgggctaagatctaatggtgtcgttcgacggccgcgggcactagccacgagccaagagcggtacagttgctgcgaaatggtgggcagcctgacaggttcagtttgaataggatgaaaacgccatgaagaacagagaagctggcaattgacgatagtggggcgagcgcacgctgcttgctggtccgagcgtaggacgaacgacaaaccatgggcggggccaccaggccccagggagggcgtcactggttggatgtcgtctgttaggctagagctcaggcgctcagggcctctggcccaagcctcggacgcaagcctctgacgagcgagcgcgcgctggggcgggtctgcgcaggaacggcaggactgccgagttggttgaatattgaatggttggatgattggtttgctgggtttggttttgacacgcacggcacaggacaagtgagtttggaggttggatttgcgcaggtagaaagggcgctcggcctcagggcctcagcgtcagcagacgagctcgccagtccaggtcagtacccagtgttcgttacttcccaccgtccagagtttgctgctgcctctcagcttgattcgtgtcggagaagtagaaatggtcacagcgtaccacacactgtccccatgcctgcgtcctgctccacgagtgtttagccacaaaaatttatggacaaccttactgagcctgtgctggggggtgctttagcaccagcactggcgccatggcgtcaaggttaattccactgtcattcgacaaccttcaactgatgggggcaactgggcacaaaaccttggatatataaccaactccaactcccacggttttttaccttttgctcttctccccaggactcactacttctactcctctattcatcttcaccaaaatgtgagacctaatatcactgctgtacagacaagactgtgtatattaggtctcaatgaaagtggcggtttggtatggtgacaaaaatattgtcttggaggaccgtccgatcccttctatcggtgaaaaggacgtcttggtccgtgtcaagtcgtcttccatctgcggagctgaccttcatgcctacaaaggcctctctaagcgccgcaagcctccattggtgatgggacatgaattttccggtatggttgaacgcctcggcgatgagacaaagggccttaaggtcggcgatcgtgtcgtggtggagcccattattagctgcggaaagtgcaaggcatgcaaaaagggaaaaacgaatgtctgcgaaaatcgtaagctgatcggtctgaacctcgacggtgctttcgctgaatatgtttctgtcccttatgaaaagtgccatgaactcccccgtgacctttcgttcgatgagggtgcgattatcgagccgttggccgtcgccgttcatgcggtcaatattactcccatctcgtcgaacgataacgtgcttatcattggtagcggtgtgattggcctcctcatcacacaattgcttcgaagccgcacttcgggcgacattttggttaccggacgtcgcgattacctccttgaaaaggcccgtgaatttggtgccacagatgcaatcaacgtgatcgactgcgatgctgtgaaaacgctgctcaaaaaacacggtcgcgtcgatgttgtcttcgaagcagtgggctctaacgagactgtgaaccagtccatttccctggtcgaatctggaggttctatcactctcgttggcatgctcgatcgcgagatgaccgttgatatgatggaggttgttgcccgtgaaatcactctgcgaggagattatggttatacaactgacgactttaaggaggcgatcgagctcgcttcttcgggtaaagttgatctcaaaggcctcatcacgcatgttctcccgctcgatgagatcaaaaagggcttcgatatcctggcagaacgccgagaaaatgtgatcaaagttgttattaacccataacacggatcaacaaaaatgtgcgccagctttgttgtgtgcccttttcctctagcggatcctatccacatttcgtgaatgaaccgattaagctctgacgagatttccttgttttctgtagatacctcttgtagaggtgtcaaagttatgttgtgatcgagagagttacctgcaaggtattatgcaagcggcttgatgaggacactcaactacgtgtgagtaggagtgcgttgctcagcagttgacgcgtgagccgcttgagcagcttgataaaggtcctaatcgtcttccagctgttggcagacgacaatgtgctgtagtagtaggataggcccgtaaaagtgtagaagcaataggttgagactgactgtaatgggtacttgcgttcaaagactgaaagtccaaaggattgctcaaaggcccctgaggtctgagcctctgagcgcgctcttcgtcaaaattcgccggggccatcggtcatcctctcgagggcagcatcttcctgcttgaagactgagtccgtctcagataacttcgtataatgtatgctatacgaagttatcctgcaggagctcagaccttgcatgttagccttgaccttgcctctatgaccactaattcgcacaagattgcacgttaccattgtcatcttgccatgtatccaatgtttcctgtttgccatagtacgtagtagatacatcgatcatcgatgcagatgacgcagatggcattggttcgctttgccctatgcatgcatcatgcatcatgcatcatgcgtcatgcgtcactatccatattaatcattgccctctgtactaggccatgacacctgcagacccttccccagggatgcttcttgtaatagccaatatactacacaactttaccgattacgatcgagatcgatctcactatagtttgtcgaacttcgatgcacatcgagggtgcggaaaaaagctgacggaagcggaagtgggtgaattggttaatttagttagattggcagggttgttcccaagattcaacgcaagctgagaaagaaaacagaaacacgaggcataaggccagtcagaaaatgcattacgaggggagttgaagtgactgtgggccagtgcctgggtcgtcatgtgcaaattttttcttcggttagactgccgcagcatgcagcaactctgccggccctatataactagtgcttcatcttcttgtcattcttgtctctttaccaacacaccggtactctttcaccatgggtaaggaaaagacacacgtatcgcgaccccgactcaactccaacatggacgcagacctgtacggatacaaatgggctcgagataatgtcggacagtcgggtgcgacgatctacagactctatggaaaaccggacgcccccgagctctttcttaaacacggcaagggtagcgttgcaaacgacgtaaccgacgaaatggtccgtctgaattggctaactgagttcatgccactccccaccatcaagcacttcatccgtacacctgacgatgcgtggctgttgactacggccatccccggtaagaccgcttttcaggtcctcgaggaataccctgactcgggcgagaacatcgtggatgccttggctgtgtttttgcgccgccttcactctattccggtctgcaactgccctttcaacagcgaccgtgtttttaggcttgcccaggcacaatcacgcatgaacaatggtctagtcgacgctagtgatttcgatgacgagcgcaacggctggccggtggaacaagtgtggaaagagatgcataagctcctgcccttttccccagactctgtcgtgacgcatggtgatttctcgcttgacaacctcatctttgacgagggcaagctcattggctgcattgacgtcggccgggttggcatcgccgatcgctaccaagatcttgcgatcctctggaattgtctgggcgagttctcccctagcctccagaagcgtctgttccagaaatatgggatcg

SEQ ID NO: 66 - DNA, 4612 bp, synthetic construct
  source 1..4612: mol_type = other DNA
tgcagagccttgcaaatgatgaaagaccaatggaattgatcattgattattgatgatgcatgatgaaagagatagaaacagatgcaagatgggatggcgcgatgatcaaatgataatgaacgttcaacccttcaaaattgaaactctcaggctgagcggctgagcaagctctgagaatgtgggtcttcgaagactttcgcttgagcatggtgcatgtgcaaagagatggaatgtggaattgttgtaggtaggaacacagcccggtagagcggcgcagtggctcagcgaagctgggagaacgactgaaccggtcttgagattcatcatctcagcgtgcgtcagcgcgtcagcttcagcgtttgagaatggcacggactgacctgtcgtacatcccaaggaggcccgtgcgctatactcgccttgtggcctaatctgcgatcaacccatcctcaacgaaagcgcaagtagcgactaagcacactatctttcgggtcggtgcggtcacagtatcggcatctctgtctttagctacgatggtgtgcgtgtaactgatcagtacacccgctgtatcaaaactctatcttcaatccgctaagaatcgtcaccatcagtacatcagtacatcagtgggctaagatctaatggtgtcgttcgacggccgcgggcactagccacgagccaagagcggtacagttgctgcgaaatggtgggcagcctgacaggttcagtttgaataggatgaaaacgccatgaagaacagagaagctggcaattgacgatagtggggcgagcgcacgctgcttgctggtccgagcgtaggacgaacgacaaaccatgggcggggccaccaggccccagggagggcgtcactggttggatgtcgtctgttaggctagagctcaggcgctcagggcctctggcccaagcctcggacgcaagcctctgacgagcgagcgcgcgctggggcgggtctgcgcaggaacggcaggactgccgagttggttgaatattgaatggttggatgattggtttgctgggtttggttttgacacgcacggcacaggacaagtgagtttggaggttggatttgcgcaggtagaaagggcgctcggcctcagggcctcagcgtcagcagacgagctcgccagtccaggtcagtacccagtgttcgttacttcccaccgtccagagtttgctgctgcctctcagcttgattcgtgtcggagaagtagaaatggtcacagcgtaccacacactgtccccatgcctgcgtcctgctccacgagtgtttagccacaaaaatttatggacaaccttactgagcctgtgctggggggtgctttagcaccagcactggcgccatggcgtcaaggttaattccactgtcattcgacaaccttcaactgatgggggcaactgggcacaaaaccttggatatataaccaactccaactcccacggttttttaccttttgctcttctccccaggactcactacttctactcctctattcatcttcaccaaaatgtgagacctaatatcactgctgtacagacaagactgtgtatattaggtctcaatgaaagcactggtgttggaggaaatcggtaaattgacccttaaagaggttgagacgcccgtgccaggacgcggagaggttttgttgcgcatccatgcctgtggtatttgctcttcggacaaagcccgtctcttcaagaacggtactcacaccatgccgcttatcccaggtcacgagatctcgggtgagattgttgcaggaggtcccggcattcgagaagagcttatcggccgacgcgctgcggtcttcccgttgattccttgtcgccaatgcgactcctgccgaatcggcaagtacgctcaatgcgagcattacgactatttcggatcgcgtcgagacggaggctttgctgagtacctcgctgtccccgtgtttaatatcaatcttcttcccgatgatatggattatcatacggctgcattgtgcgaaccagccacggttgcatctcatgcacttaagcgcgccaaaatgaaatctggtgatatcgttacgatcattggcactggcacggtcggcctcctggctgctggcatcgctcgtattcgacgagcatctaaaatcattatcgtcggacgaagcaaagaaaaaatcatgaatgcagctcatttcgctgatcatgtgatcaatgcagagggatgggacgtgaacgaggccgtggcttcgctgacggagggtcacatgagcgatgtggtcttggagactggcggcaacagcgatgcttgcacgtacgcgcttatggctgccggcaaaggtacgactgtgatgtttattggcaatcccgaagaaccgattgtttttaaccgtgatatttattggaagatcctccgaaacgaactgacactcaagggtacttggaattctggatatgctcctgaggataatgactggaatgacgtcatccgttatatggcagatggacagattccggcagataaaattatcaccgatagctttccattggaagattataataaggcattcgagcttcttctctcggatcgcttttacaccaaaatcatgtttgacatctaacacggatcaacaaaaatgtgcgccagctttgttgtgtgcccttttcctctagcggatcctatccacatttcgtgaatgaaccgattaagctctgacgagatttccttgttttctgtagatacctcttgtagaggtgtcaaagttatgttgtgatcgagagagttacctgcaaggtattatgcaagcggcttgatgaggacactcaactacgtgtgagtaggagtgcgttgctcagcagttgacgcgtgagccgcttgagcagcttgataaaggtcctaatcgtcttccagctgttggcagacgacaatgtgctgtagtagtaggataggcccgtaaaagtgtagaagcaataggttgagactgactgtaatgggtacttgcgttcaaagactgaaagtccaaaggattgctcaaaggcccctgaggtctgagcctctgagcgcgctcttcgtcaaaattcgccggggccatcggtcatcctctcgagggcagcatcttcctgcttgaagactgagtccgtctcagataacttcgtataatgtatgctatacgaagttatcctgcaggagctcagaccttgcatgttagccttgaccttgcctctatgaccactaattcgcacaagattgcacgttaccattgtcatcttgccatgtatccaatgtttcctgtttgccatagtacgtagtagatacatcgatcatcgatgcagatgacgcagatggcattggttcgctttgccctatgcatgcatcatgcatcatgcatcatgcgtcatgcgtcactatccatattaatcattgccctctgtactaggccatgacacctgcagacccttccccagggatgcttcttgtaatagccaatatactacacaactttaccgattacgatcgagatcgatctcactatagtttgtcgaacttcgatgcacatcgagggtgcggaaaaaagctgacggaagcggaagtgggtgaattggttaatttagttagattggcagggttgttcccaagattcaacgcaagctgagaaagaaaacagaaacacgaggcataaggccagtcagaaaatgcattacgaggggagttgaagtgactgtgggccagtgcctgggtcgtcatgtgcaaattttttcttcggttagactgccgcagcatgcagcaactctgccggccctatataactagtgcttcatcttcttgtcattcttgtctctttaccaacacaccggtactctttcaccatgggtaaggaaaagacacacgtatcgcgaccccgactcaactccaacatggacgcagacctgtacggatacaaatgggctcgagataatgtcggacagtcgggtgcgacgatctacagactctatggaaaaccggacgcccccgagctctttcttaaacacggcaagggtagcgttgcaaacgacgtaaccgacgaaatggtccgtctgaattggctaactgagttcatgccactccccaccatcaagcacttcatccgtacacctgacgatgcgtggctgttgactacggccatccccggtaagaccgcttttcaggtcctcgaggaataccctgactcgggcgagaacatcgtggatgccttggctgtgtttttgcgccgccttcactctattccggtctgcaactgccctttcaacagcgaccgtgtttttaggcttgcccaggcacaatcacgcatgaacaatggtctagtcgacgctagtgatttcgatgacgagcgcaacggctggccggtggaacaagtgtggaaagagatgcataagctcctgcccttttccccagactctgtcgtgacgcatggtgatttctcgcttgacaacctcatctttgacgagggcaagctcattggctgcattgacgtcggccgggttggcatcgccgatcgctaccaagatcttgcgatcctctggaattgtctgggcgagttctcccctagcctccagaagcgtctgttccagaaatatgggatcg

SEQ ID NO: 67 - DNA, 4627 bp, synthetic construct
  source 1..4627: mol_type = other DNA
tgcagagccttgcaaatgatgaaagaccaatggaattgatcattgattattgatgatgcatgatgaaagagatagaaacagatgcaagatgggatggcgcgatgatcaaatgataatgaacgttcaacccttcaaaattgaaactctcaggctgagcggctgagcaagctctgagaatgtgggtcttcgaagactttcgcttgagcatggtgcatgtgcaaagagatggaatgtggaattgttgtaggtaggaacacagcccggtagagcggcgcagtggctcagcgaagctgggagaacgactgaaccggtcttgagattcatcatctcagcgtgcgtcagcgcgtcagcttcagcgtttgagaatggcacggactgacctgtcgtacatcccaaggaggcccgtgcgctatactcgccttgtggcctaatctgcgatcaacccatcctcaacgaaagcgcaagtagcgactaagcacactatctttcgggtcggtgcggtcacagtatcggcatctctgtctttagctacgatggtgtgcgtgtaactgatcagtacacccgctgtatcaaaactctatcttcaatccgctaagaatcgtcaccatcagtacatcagtacatcagtgggctaagatctaatggtgtcgttcgacggccgcgggcactagccacgagccaagagcggtacagttgctgcgaaatggtgggcagcctgacaggttcagtttgaataggatgaaaacgccatgaagaacagagaagctggcaattgacgatagtggggcgagcgcacgctgcttgctggtccgagcgtaggacgaacgacaaaccatgggcggggccaccaggccccagggagggcgtcactggttggatgtcgtctgttaggctagagctcaggcgctcagggcctctggcccaagcctcggacgcaagcctctgacgagcgagcgcgcgctggggcgggtctgcgcaggaacggcaggactgccgagttggttgaatattgaatggttggatgattggtttgctgggtttggttttgacacgcacggcacaggacaagtgagtttggaggttggatttgcgcaggtagaaagggcgctcggcctcagggcctcagcgtcagcagacgagctcgccagtccaggtcagtacccagtgttcgttacttcccaccgtccagagtttgctgctgcctctcagcttgattcgtgtcggagaagtagaaatggtcacagcgtaccacacactgtccccatgcctgcgtcctgctccacgagtgtttagccacaaaaatttatggacaaccttactgagcctgtgctggggggtgctttagcaccagcactggcgccatggcgtcaaggttaattccactgtcattcgacaaccttcaactgatgggggcaactgggcacaaaaccttggatatataaccaactccaactcccacggttttttaccttttgctcttctccccaggactcactacttctactcctctattcatcttcaccaaaatgtgagacctaatatcactgctgtacagacaagactgtgtatattaggtctcaatgaaagccaatgttctgtaccacattggtgacctgcgatacactgacgttgccttgccggaactccacgacggtgaggccctcgtgcgagttcgtgcatgcggtatttgtggtagcgatgttgcccgagtcttcaccactggtacgtatcatttccccaccattattggccatgagttctcgggcgaagtcgttgaaacatattctgcggctgacgcggagtgggtgggtcgccgcgtgagcgtttttcccctcatcccttgtcgccattgtgatgcctgtcatcatggtcagtacgaaatgtgcacatgttacaactatctcggcagccgtaccgatggaggcttcgcagagtacgtggctgtcccggtctggaatctctttcgtctgccagattccgtgtcttacgaggagggcgcaatgatggaaccggccgctgtcgctatgcacgcgctcaagattgcccgtgtgggtatgggtgacactgtggcaattacaggtcccggaactattggtatgattttgacccaattgatccaacgtattggcggtacaaaagcggttctgatcggacgcacccaagcaaaattggattacgcacgacgcatcggcatccgtcatgtgtgcaattcgggaaccgagcacgtcgcggaccgcgttggacaacttacaggcggacgtggagccgacatcgcaattgaaggaaccggtgcgtcggaacccatgaatctgtgcttgaatttggtgcgctctgaaggacgtattgtcgctatgggaaacccccaaggtgacatgctgttccgaaaggatgcgtattggaagcttctgcgcaagcagctgacccttcgtggaacctggaattcgacatatggattgggccgagatgattggcaggatatttccgcccttcttgctgagggagcattgaacttgcgcggccttatcacacaccgactcccactggccgagctgcagcagggactcagcctcatgcgagacgcagcagtctacactaacaaagttatgatcgtcgacgagcaaggttaacacggatcaacaaaaatgtgcgccagctttgttgtgtgcccttttcctctagcggatcctatccacatttcgtgaatgaaccgattaagctctgacgagatttccttgttttctgtagatacctcttgtagaggtgtcaaagttatgttgtgatcgagagagttacctgcaaggtattatgcaagcggcttgatgaggacactcaactacgtgtgagtaggagtgcgttgctcagcagttgacgcgtgagccgcttgagcagcttgataaaggtcctaatcgtcttccagctgttggcagacgacaatgtgctgtagtagtaggataggcccgtaaaagtgtagaagcaataggttgagactgactgtaatgggtacttgcgttcaaagactgaaagtccaaaggattgctcaaaggcccctgaggtctgagcctctgagcgcgctcttcgtcaaaattcgccggggccatcggtcatcctctcgagggcagcatcttcctgcttgaagactgagtccgtctcagataacttcgtataatgtatgctatacgaagttatcctgcaggagctcagaccttgcatgttagccttgaccttgcctctatgaccactaattcgcacaagattgcacgttaccattgtcatcttgccatgtatccaatgtttcctgtttgccatagtacgtagtagatacatcgatcatcgatgcagatgacgcagatggcattggttcgctttgccctatgcatgcatcatgcatcatgcatcatgcgtcatgcgtcactatccatattaatcattgccctctgtactaggccatgacacctgcagacccttccccagggatgcttcttgtaatagccaatatactacacaactttaccgattacgatcgagatcgatctcactatagtttgtcgaacttcgatgcacatcgagggtgcggaaaaaagctgacggaagcggaagtgggtgaattggttaatttagttagattggcagggttgttcccaagattcaacgcaagctgagaaagaaaacagaaacacgaggcataaggccagtcagaaaatgcattacgaggggagttgaagtgactgtgggccagtgcctgggtcgtcatgtgcaaattttttcttcggttagactgccgcagcatgcagcaactctgccggccctatataactagtgcttcatcttcttgtcattcttgtctctttaccaacacaccggtactctttcaccatgggtaaggaaaagacacacgtatcgcgaccccgactcaactccaacatggacgcagacctgtacggatacaaatgggctcgagataatgtcggacagtcgggtgcgacgatctacagactctatggaaaaccggacgcccccgagctctttcttaaacacggcaagggtagcgttgcaaacgacgtaaccgacgaaatggtccgtctgaattggctaactgagttcatgccactccccaccatcaagcacttcatccgtacacctgacgatgcgtggctgttgactacggccatccccggtaagaccgcttttcaggtcctcgaggaataccctgactcgggcgagaacatcgtggatgccttggctgtgtttttgcgccgccttcactctattccggtctgcaactgccctttcaacagcgaccgtgtttttaggcttgcccaggcacaatcacgcatgaacaatggtctagtcgacgctagtgatttcgatgacgagcgcaacggctggccggtggaacaagtgtggaaagagatgcataagctcctgcccttttccccagactctgtcgtgacgcatggtgatttctcgcttgacaacctcatctttgacgagggcaagctcattggctgcattgacgtcggccgggttggcatcgccgatcgctaccaagatcttgcgatcctctggaattgtctgggcgagttctcccctagcctccagaagcgtctgttccagaaatatgggatcg

SEQ ID NO: 68 - DNA, 4594 bp, synthetic construct
  source 1..4594: mol_type = other DNA
tgcagagccttgcaaatgatgaaagaccaatggaattgatcattgattattgatgatgcatgatgaaagagatagaaacagatgcaagatgggatggcgcgatgatcaaatgataatgaacgttcaacccttcaaaattgaaactctcaggctgagcggctgagcaagctctgagaatgtgggtcttcgaagactttcgcttgagcatggtgcatgtgcaaagagatggaatgtggaattgttgtaggtaggaacacagcccggtagagcggcgcagtggctcagcgaagctgggagaacgactgaaccggtcttgagattcatcatctcagcgtgcgtcagcgcgtcagcttcagcgtttgagaatggcacggactgacctgtcgtacatcccaaggaggcccgtgcgctatactcgccttgtggcctaatctgcgatcaacccatcctcaacgaaagcgcaagtagcgactaagcacactatctttcgggtcggtgcggtcacagtatcggcatctctgtctttagctacgatggtgtgcgtgtaactgatcagtacacccgctgtatcaaaactctatcttcaatccgctaagaatcgtcaccatcagtacatcagtacatcagtgggctaagatctaatggtgtcgttcgacggccgcgggcactagccacgagccaagagcggtacagttgctgcgaaatggtgggcagcctgacaggttcagtttgaataggatgaaaacgccatgaagaacagagaagctggcaattgacgatagtggggcgagcgcacgctgcttgctggtccgagcgtaggacgaacgacaaaccatgggcggggccaccaggccccagggagggcgtcactggttggatgtcgtctgttaggctagagctcaggcgctcagggcctctggcccaagcctcggacgcaagcctctgacgagcgagcgcgcgctggggcgggtctgcgcaggaacggcaggactgccgagttggttgaatattgaatggttggatgattggtttgctgggtttggttttgacacgcacggcacaggacaagtgagtttggaggttggatttgcgcaggtagaaagggcgctcggcctcagggcctcagcgtcagcagacgagctcgccagtccaggtcagtacccagtgttcgttacttcccaccgtccagagtttgctgctgcctctcagcttgattcgtgtcggagaagtagaaatggtcacagcgtaccacacactgtccccatgcctgcgtcctgctccacgagtgtttagccacaaaaatttatggacaaccttactgagcctgtgctggggggtgctttagcaccagcactggcgccatggcgtcaaggttaattccactgtcattcgacaaccttcaactgatgggggcaactgggcacaaaaccttggatatataaccaactccaactcccacggttttttaccttttgctcttctccccaggactcactacttctactcctctattcatcttcaccaaaatgtgagacctaatatcactgctgtacagacaagactgtgtatattaggtctcaatgcgcgcctatgagcttcacggagtcaacgacttgcgtcgcgaggacatcgaaaaacctgagattccctctggatgggttcttgtgcaagtcaaagcgagcggcatttgcagctccgacatccctcgtatcttcacgaacggcacttatcactttcctaccattccgggccacgaattctctggagtcgtggccgcctatggcgaaggtgtcccggaagaacgcgttggcaaacgagtgggtatttttccgctgatcccgtgtcgtacatgtccccaatgccgccagaagaaatacgaaatgtgcgagcactatgattaccttggctcgcgtcgtgacggcggattcgccgaatacgttgcagtcccggactggaacctcctggaattgccggagaacgtttcgttccgcgaggcggcgatgctcgaacctctgtcggtggcacttcatgccgtgaaacgcagcggcgtgaaacctggtgatacagccgctgtgatcggcacaggaatgatcggttttgccgcagctgcttgggccaaagcactgggagcagaaacggtgttcgtgattggacgcggcgaggccaaacgcgctattgctgaacaaattcccggaatttcctatgtgactgaagaggaatccaaggccattcaggcggacgtggtcgtcgaagcagttggtacaccacaggctgtttcctccgcggtgttgcttgcacgaccgggaggttccattgttctgatgggcaacccatccggtgatcttgcgatggaaaaaaacgtctactggcgtatcctccgtaagcaacttaacttgatgggaacgtggaatagctcgtatgaaaaagacgaagcctgtgactggaccgaagcgctcgacgcattgtccaagaaaaagattcctgcccaagcacttatcactcattgttttcccagcgaaaaacttatggatggactggaattgatgaagaatcataaggaaccatactgtaaagttatggtcagctgggagtaacacggatcaacaaaaatgtgcgccagctttgttgtgtgcccttttcctctagcggatcctatccacatttcgtgaatgaaccgattaagctctgacgagatttccttgttttctgtagatacctcttgtagaggtgtcaaagttatgttgtgatcgagagagttacctgcaaggtattatgcaagcggcttgatgaggacactcaactacgtgtgagtaggagtgcgttgctcagcagttgacgcgtgagccgcttgagcagcttgataaaggtcctaatcgtcttccagctgttggcagacgacaatgtgctgtagtagtaggataggcccgtaaaagtgtagaagcaataggttgagactgactgtaatgggtacttgcgttcaaagactgaaagtccaaaggattgctcaaaggcccctgaggtctgagcctctgagcgcgctcttcgtcaaaattcgccggggccatcggtcatcctctcgagggcagcatcttcctgcttgaagactgagtccgtctcagataacttcgtataatgtatgctatacgaagttatcctgcaggagctcagaccttgcatgttagccttgaccttgcctctatgaccactaattcgcacaagattgcacgttaccattgtcatcttgccatgtatccaatgtttcctgtttgccatagtacgtagtagatacatcgatcatcgatgcagatgacgcagatggcattggttcgctttgccctatgcatgcatcatgcatcatgcatcatgcgtcatgcgtcactatccatattaatcattgccctctgtactaggccatgacacctgcagacccttccccagggatgcttcttgtaatagccaatatactacacaactttaccgattacgatcgagatcgatctcactatagtttgtcgaacttcgatgcacatcgagggtgcggaaaaaagctgacggaagcggaagtgggtgaattggttaatttagttagattggcagggttgttcccaagattcaacgcaagctgagaaagaaaacagaaacacgaggcataaggccagtcagaaaatgcattacgaggggagttgaagtgactgtgggccagtgcctgggtcgtcatgtgcaaattttttcttcggttagactgccgcagcatgcagcaactctgccggccctatataactagtgcttcatcttcttgtcattcttgtctctttaccaacacaccggtactctttcaccatgggtaaggaaaagacacacgtatcgcgaccccgactcaactccaacatggacgcagacctgtacggatacaaatgggctcgagataatgtcggacagtcgggtgcgacgatctacagactctatggaaaaccggacgcccccgagctctttcttaaacacggcaagggtagcgttgcaaacgacgtaaccgacgaaatggtccgtctgaattggctaactgagttcatgccactccccaccatcaagcacttcatccgtacacctgacgatgcgtggctgttgactacggccatccccggtaagaccgcttttcaggtcctcgaggaataccctgactcgggcgagaacatcgtggatgccttggctgtgtttttgcgccgccttcactctattccggtctgcaactgccctttcaacagcgaccgtgtttttaggcttgcccaggcacaatcacgcatgaacaatggtctagtcgacgctagtgatttcgatgacgagcgcaacggctggccggtggaacaagtgtggaaagagatgcataagctcctgcccttttccccagactctgtcgtgacgcatggtgatttctcgcttgacaacctcatctttgacgagggcaagctcattggctgcattgacgtcggccgggttggcatcgccgatcgctaccaagatcttgcgatcctctggaattgtctgggcgagttctcccctagcctccagaagcgtctgttccagaaatatgggatcg

SEQ ID NO: 69 - DNA, 4645 bp, synthetic construct
  source 1..4645: mol_type = other DNA
tgcagagccttgcaaatgatgaaagaccaatggaattgatcattgattattgatgatgcatgatgaaagagatagaaacagatgcaagatgggatggcgcgatgatcaaatgataatgaacgttcaacccttcaaaattgaaactctcaggctgagcggctgagcaagctctgagaatgtgggtcttcgaagactttcgcttgagcatggtgcatgtgcaaagagatggaatgtggaattgttgtaggtaggaacacagcccggtagagcggcgcagtggctcagcgaagctgggagaacgactgaaccggtcttgagattcatcatctcagcgtgcgtcagcgcgtcagcttcagcgtttgagaatggcacggactgacctgtcgtacatcccaaggaggcccgtgcgctatactcgccttgtggcctaatctgcgatcaacccatcctcaacgaaagcgcaagtagcgactaagcacactatctttcgggtcggtgcggtcacagtatcggcatctctgtctttagctacgatggtgtgcgtgtaactgatcagtacacccgctgtatcaaaactctatcttcaatccgctaagaatcgtcaccatcagtacatcagtacatcagtgggctaagatctaatggtgtcgttcgacggccgcgggcactagccacgagccaagagcggtacagttgctgcgaaatggtgggcagcctgacaggttcagtttgaataggatgaaaacgccatgaagaacagagaagctggcaattgacgatagtggggcgagcgcacgctgcttgctggtccgagcgtaggacgaacgacaaaccatgggcggggccaccaggccccagggagggcgtcactggttggatgtcgtctgttaggctagagctcaggcgctcagggcctctggcccaagcctcggacgcaagcctctgacgagcgagcgcgcgctggggcgggtctgcgcaggaacggcaggactgccgagttggttgaatattgaatggttggatgattggtttgctgggtttggttttgacacgcacggcacaggacaagtgagtttggaggttggatttgcgcaggtagaaagggcgctcggcctcagggcctcagcgtcagcagacgagctcgccagtccaggtcagtacccagtgttcgttacttcccaccgtccagagtttgctgctgcctctcagcttgattcgtgtcggagaagtagaaatggtcacagcgtaccacacactgtccccatgcctgcgtcctgctccacgagtgtttagccacaaaaatttatggacaaccttactgagcctgtgctggggggtgctttagcaccagcactggcgccatggcgtcaaggttaattccactgtcattcgacaaccttcaactgatgggggcaactgggcacaaaaccttggatatataaccaactccaactcccacggttttttaccttttgctcttctccccaggactcactacttctactcctctattcatcttcaccaaaatgtgagacctaatatcactgctgtacagacaagactgtgtatattaggtctcaatgaagcgtatgcgagctgccatcttgtatggaccaaaagacatccgaattgaaaacattgagatgcccaaggttaagccggagtgggtgcttattaaggttcgcgcaacaggtatctgcggttctgatctgcacttttacaaagagaagagctttattcctattattagcgacgtgggcaaaggacgctacgtccccggtcatgaattttcgggcgaggtctacgagttgggttcgaaggtcaaaggcctgaagaaaggagatcgcgtcggcgtcgaacccatcattggttgcggcaaatgtcagtggtgcaaggtcggatgttacaacttgtgtgagcactacaaattgattggctttcactatattggaggtatggctgagtattgtgttgctcctgctgagaattgttttaagctcccaaacaatgtttcgttcgaaagcgcggcaatgcttgactgtatcgccgtggctattcacgcagtgaataaagcagaaattcgcggcggtgacagcgttctcattgtcggcgccggtgccatcggactcttcgccctccaggcagcgctcatccagggagcgagcgacgtgtacgtcgttggaaaatacgaattccagttggagaaagctcgcaagttgggagcgacagctgtgattaacgctaaaaacgaatctttctccgaaaaaatcatggaaattacttcgggtaaaggagtcgataaggtcattgaggccgtcggcggagcctccaatgttatttctgacgtccttgacgtgactcgaaaaaagggtactatcgtgaccactggtatctttacacgaccactctcggtcgattttttcaaaattctcacaaaagagttgacgatcacttcgtcgtggggatactgttacttcgaccgtcgcaaggagtttggcacggcgctcgactttctggcaaaagaaaagatcaacactcaggaacttattacacataagtatcctttggagaaggtttccgaagcctttgagacggcactcaacaaaaataaggagaagagcatcaaggtggagattatcttctaacacggatcaacaaaaatgtgcgccagctttgttgtgtgcccttttcctctagcggatcctatccacatttcgtgaatgaaccgattaagctctgacgagatttccttgttttctgtagatacctcttgtagaggtgtcaaagttatgttgtgatcgagagagttacctgcaaggtattatgcaagcggcttgatgaggacactcaactacgtgtgagtaggagtgcgttgctcagcagttgacgcgtgagccgcttgagcagcttgataaaggtcctaatcgtcttccagctgttggcagacgacaatgtgctgtagtagtaggataggcccgtaaaagtgtagaagcaataggttgagactgactgtaatgggtacttgcgttcaaagactgaaagtccaaaggattgctcaaaggcccctgaggtctgagcctctgagcgcgctcttcgtcaaaattcgccggggccatcggtcatcctctcgagggcagcatcttcctgcttgaagactgagtccgtctcagataacttcgtataatgtatgctatacgaagttatcctgcaggagctcagaccttgcatgttagccttgaccttgcctctatgaccactaattcgcacaagattgcacgttaccattgtcatcttgccatgtatccaatgtttcctgtttgccatagtacgtagtagatacatcgatcatcgatgcagatgacgcagatggcattggttcgctttgccctatgcatgcatcatgcatcatgcatcatgcgtcatgcgtcactatccatattaatcattgccctctgtactaggccatgacacctgcagacccttccccagggatgcttcttgtaatagccaatatactacacaactttaccgattacgatcgagatcgatctcactatagtttgtcgaacttcgatgcacatcgagggtgcggaaaaaagctgacggaagcggaagtgggtgaattggttaatttagttagattggcagggttgttcccaagattcaacgcaagctgagaaagaaaacagaaacacgaggcataaggccagtcagaaaatgcattacgaggggagttgaagtgactgtgggccagtgcctgggtcgtcatgtgcaaattttttcttcggttagactgccgcagcatgcagcaactctgccggccctatataactagtgcttcatcttcttgtcattcttgtctctttaccaacacaccggtactctttcaccatgggtaaggaaaagacacacgtatcgcgaccccgactcaactccaacatggacgcagacctgtacggatacaaatgggctcgagataatgtcggacagtcgggtgcgacgatctacagactctatggaaaaccggacgcccccgagctctttcttaaacacggcaagggtagcgttgcaaacgacgtaaccgacgaaatggtccgtctgaattggctaactgagttcatgccactccccaccatcaagcacttcatccgtacacctgacgatgcgtggctgttgactacggccatccccggtaagaccgcttttcaggtcctcgaggaataccctgactcgggcgagaacatcgtggatgccttggctgtgtttttgcgccgccttcactctattccggtctgcaactgccctttcaacagcgaccgtgtttttaggcttgcccaggcacaatcacgcatgaacaatggtctagtcgacgctagtgatttcgatgacgagcgcaacggctggccggtggaacaagtgtggaaagagatgcataagctcctgcccttttccccagactctgtcgtgacgcatggtgatttctcgcttgacaacctcatctttgacgagggcaagctcattggctgcattgacgtcggccgggttggcatcgccgatcgctaccaagatcttgcgatcctctggaattgtctgggcgagttctcccctagcctccagaagcgtctgttccagaaatatgggatcg

SEQ ID NO: 70 - DNA, 4633 bp, synthetic construct
  source 1..4633: mol_type = other DNA
tgcagagccttgcaaatgatgaaagaccaatggaattgatcattgattattgatgatgcatgatgaaagagatagaaacagatgcaagatgggatggcgcgatgatcaaatgataatgaacgttcaacccttcaaaattgaaactctcaggctgagcggctgagcaagctctgagaatgtgggtcttcgaagactttcgcttgagcatggtgcatgtgcaaagagatggaatgtggaattgttgtaggtaggaacacagcccggtagagcggcgcagtggctcagcgaagctgggagaacgactgaaccggtcttgagattcatcatctcagcgtgcgtcagcgcgtcagcttcagcgtttgagaatggcacggactgacctgtcgtacatcccaaggaggcccgtgcgctatactcgccttgtggcctaatctgcgatcaacccatcctcaacgaaagcgcaagtagcgactaagcacactatctttcgggtcggtgcggtcacagtatcggcatctctgtctttagctacgatggtgtgcgtgtaactgatcagtacacccgctgtatcaaaactctatcttcaatccgctaagaatcgtcaccatcagtacatcagtacatcagtgggctaagatctaatggtgtcgttcgacggccgcgggcactagccacgagccaagagcggtacagttgctgcgaaatggtgggcagcctgacaggttcagtttgaataggatgaaaacgccatgaagaacagagaagctggcaattgacgatagtggggcgagcgcacgctgcttgctggtccgagcgtaggacgaacgacaaaccatgggcggggccaccaggccccagggagggcgtcactggttggatgtcgtctgttaggctagagctcaggcgctcagggcctctggcccaagcctcggacgcaagcctctgacgagcgagcgcgcgctggggcgggtctgcgcaggaacggcaggactgccgagttggttgaatattgaatggttggatgattggtttgctgggtttggttttgacacgcacggcacaggacaagtgagtttggaggttggatttgcgcaggtagaaagggcgctcggcctcagggcctcagcgtcagcagacgagctcgccagtccaggtcagtacccagtgttcgttacttcccaccgtccagagtttgctgctgcctctcagcttgattcgtgtcggagaagtagaaatggtcacagcgtaccacacactgtccccatgcctgcgtcctgctccacgagtgtttagccacaaaaatttatggacaaccttactgagcctgtgctggggggtgctttagcaccagcactggcgccatggcgtcaaggttaattccactgtcattcgacaaccttcaactgatgggggcaactgggcacaaaaccttggatatataaccaactccaactcccacggttttttaccttttgctcttctccccaggactcactacttctactcctctattcatcttcaccaaaatgtgagacctaatatcactgctgtacagacaagactgtgtatattaggtctcaatgaaagcctgggtgctgcacggtatcggagatatccaatacgaggaagttaaggagccgcagtcggctggcgacgaggttattatgaaagtgatgagcgtgggaatctgtggatctgacatccctcgcatttataaaaccggcacctatcatttcccaacaatccccggccacgaattctccggtattgtggccgatgttggtgccggagtcaacccgaaatggaagaataagcgcgtcggcgtgtttccattgatcccatgtcacgtttgtgcttcgtgtaaaaaaggtcaatatgaaatgtgtcgcaactacggatatctgggtagccgccaaaatggtggttttgcagagtatgcggcggttcctgtcaagaatctcatcgaactcccggactctgtctctatgcaggaagctgccatgcttgagccgatggccgtggcagtccatgctatgcgacgagcccgtcccatgaccggagatcgtattgtcgtgtgcggacttggaactatcggcatgcttctcgtgtcctttttgcgagagacgggaattcgagacatctttgtcatcggcaataaggcattccagcgaatcaccatcctcaaaactggcctgcaggaaaactgttattgtgattctcgcgtgcaggatgtcgagaagtggctcatggagcgaactgaaggaaagggcgcagacgtgttctttgagtgtgttggccgaaacgaaaccatctcccaagcagtcaacctgacggcacccggaggttcggtctgtctggttggtaatccttgttcggatatgacgcttgagcgtgaggtctactggaaaattctccgtaaccagcttactattactggcacctggaattcctcgttcacccacgagatcgaggacgactggcattacgtgttggatcgcctggaacaaggtaagatctcgcctggtgatctcatttctcacaaattcccgctcaagaacttggaatctggtctgcatattatgcgtgataagactcaagattatatcaaaatcatggccgagattaatgtgtaacacggatcaacaaaaatgtgcgccagctttgttgtgtgcccttttcctctagcggatcctatccacatttcgtgaatgaaccgattaagctctgacgagatttccttgttttctgtagatacctcttgtagaggtgtcaaagttatgttgtgatcgagagagttacctgcaaggtattatgcaagcggcttgatgaggacactcaactacgtgtgagtaggagtgcgttgctcagcagttgacgcgtgagccgcttgagcagcttgataaaggtcctaatcgtcttccagctgttggcagacgacaatgtgctgtagtagtaggataggcccgtaaaagtgtagaagcaataggttgagactgactgtaatgggtacttgcgttcaaagactgaaagtccaaaggattgctcaaaggcccctgaggtctgagcctctgagcgcgctcttcgtcaaaattcgccggggccatcggtcatcctctcgagggcagcatcttcctgcttgaagactgagtccgtctcagataacttcgtataatgtatgctatacgaagttatcctgcaggagctcagaccttgcatgttagccttgaccttgcctctatgaccactaattcgcacaagattgcacgttaccattgtcatcttgccatgtatccaatgtttcctgtttgccatagtacgtagtagatacatcgatcatcgatgcagatgacgcagatggcattggttcgctttgccctatgcatgcatcatgcatcatgcatcatgcgtcatgcgtcactatccatattaatcattgccctctgtactaggccatgacacctgcagacccttccccagggatgcttcttgtaatagccaatatactacacaactttaccgattacgatcgagatcgatctcactatagtttgtcgaacttcgatgcacatcgagggtgcggaaaaaagctgacggaagcggaagtgggtgaattggttaatttagttagattggcagggttgttcccaagattcaacgcaagctgagaaagaaaacagaaacacgaggcataaggccagtcagaaaatgcattacgaggggagttgaagtgactgtgggccagtgcctgggtcgtcatgtgcaaattttttcttcggttagactgccgcagcatgcagcaactctgccggccctatataactagtgcttcatcttcttgtcattcttgtctctttaccaacacaccggtactctttcaccatgggtaaggaaaagacacacgtatcgcgaccccgactcaactccaacatggacgcagacctgtacggatacaaatgggctcgagataatgtcggacagtcgggtgcgacgatctacagactctatggaaaaccggacgcccccgagctctttcttaaacacggcaagggtagcgttgcaaacgacgtaaccgacgaaatggtccgtctgaattggctaactgagttcatgccactccccaccatcaagcacttcatccgtacacctgacgatgcgtggctgttgactacggccatccccggtaagaccgcttttcaggtcctcgaggaataccctgactcgggcgagaacatcgtggatgccttggctgtgtttttgcgccgccttcactctattccggtctgcaactgccctttcaacagcgaccgtgtttttaggcttgcccaggcacaatcacgcatgaacaatggtctagtcgacgctagtgatttcgatgacgagcgcaacggctggccggtggaacaagtgtggaaagagatgcataagctcctgcccttttccccagactctgtcgtgacgcatggtgatttctcgcttgacaacctcatctttgacgagggcaagctcattggctgcattgacgtcggccgggttggcatcgccgatcgctaccaagatcttgcgatcctctggaattgtctgggcgagttctcccctagcctccagaagcgtctgttccagaaatatgggatcg

SEQ ID NO: 71 - DNA, 4573 bp, synthetic construct
  source 1..4573: mol_type = other DNA
tgcagagccttgcaaatgatgaaagaccaatggaattgatcattgattattgatgatgcatgatgaaagagatagaaacagatgcaagatgggatggcgcgatgatcaaatgataatgaacgttcaacccttcaaaattgaaactctcaggctgagcggctgagcaagctctgagaatgtgggtcttcgaagactttcgcttgagcatggtgcatgtgcaaagagatggaatgtggaattgttgtaggtaggaacacagcccggtagagcggcgcagtggctcagcgaagctgggagaacgactgaaccggtcttgagattcatcatctcagcgtgcgtcagcgcgtcagcttcagcgtttgagaatggcacggactgacctgtcgtacatcccaaggaggcccgtgcgctatactcgccttgtggcctaatctgcgatcaacccatcctcaacgaaagcgcaagtagcgactaagcacactatctttcgggtcggtgcggtcacagtatcggcatctctgtctttagctacgatggtgtgcgtgtaactgatcagtacacccgctgtatcaaaactctatcttcaatccgctaagaatcgtcaccatcagtacatcagtacatcagtgggctaagatctaatggtgtcgttcgacggccgcgggcactagccacgagccaagagcggtacagttgctgcgaaatggtgggcagcctgacaggttcagtttgaataggatgaaaacgccatgaagaacagagaagctggcaattgacgatagtggggcgagcgcacgctgcttgctggtccgagcgtaggacgaacgacaaaccatgggcggggccaccaggccccagggagggcgtcactggttggatgtcgtctgttaggctagagctcaggcgctcagggcctctggcccaagcctcggacgcaagcctctgacgagcgagcgcgcgctggggcgggtctgcgcaggaacggcaggactgccgagttggttgaatattgaatggttggatgattggtttgctgggtttggttttgacacgcacggcacaggacaagtgagtttggaggttggatttgcgcaggtagaaagggcgctcggcctcagggcctcagcgtcagcagacgagctcgccagtccaggtcagtacccagtgttcgttacttcccaccgtccagagtttgctgctgcctctcagcttgattcgtgtcggagaagtagaaatggtcacagcgtaccacacactgtccccatgcctgcgtcctgctccacgagtgtttagccacaaaaatttatggacaaccttactgagcctgtgctggggggtgctttagcaccagcactggcgccatggcgtcaaggttaattccactgtcattcgacaaccttcaactgatgggggcaactgggcacaaaaccttggatatataaccaactccaactcccacggttttttaccttttgctcttctccccaggactcactacttctactcctctattcatcttcaccaaaatgaaggccgcagtgctccattccgaaaatctgtttacgtacgaagaagtggaaatcgatccctgcaaagacgacgaggttaagatcaaggtgatggctgcgggtatctgtggttccgatacacataagatgacgagcaaatggaaatatccccttccgaccatcatgggccatgagttttcgggctttatcgtcgagattggtgaaaaggtcactaacgcgtcgattggcgatcgagttgtggcgatccctttcttgccgtgcaatgactgcgaatactgtaagcgtggacaattctcgttgtgcgaggatcacggcatggttggatccaaaagctttggtggtttcgcggagtacgtcaatatcaaaagcactaatgttcttccgattggtgacatggattttgaggaagcagccatgattgaacctctcgcagttgcgcttcacggcgtgttgaatattcatccgcgtattggagatattgcagccgtctttggtattggcacaatcggaatcctcacaatccaatggcttaaaattgcaggagtgaaagaggttattgcgatcgacatttccgataacaagctcgcagacgcccatgctatgggctgtgagcgtactatcaatccatttaaagagaacctccttgagaaaatcgacgaatatactaacggtcgcggtgttgacatcgcctttgagtgtgctggatctaaagtcacacaagaacagtgcctgctcgtgacagccaagcgaggaaaagtcggctatttgggtatcgcttactctgatgtccatttgtcggagcaagcttttgaaaacattttccgccgcgagctcacacttaaaggattttggaactcttactccgcaccattcccgggagaggaatggaccaaaagcattgacttcattaataagggtcgtattaaactgaaagagctgattagccaccgatttaagctccaagatactcagaaagcgtttgacatgatgatcaaccgagaagagacatacggcaaggtgcttattttgcccaacaaagagtaacacggatcaacaaaaatgtgcgccagctttgttgtgtgcccttttcctctagcggatcctatccacatttcgtgaatgaaccgattaagctctgacgagatttccttgttttctgtagatacctcttgtagaggtgtcaaagttatgttgtgatcgagagagttacctgcaaggtattatgcaagcggcttgatgaggacactcaactacgtgtgagtaggagtgcgttgctcagcagttgacgcgtgagccgcttgagcagcttgataaaggtcctaatcgtcttccagctgttggcagacgacaatgtgctgtagtagtaggataggcccgtaaaagtgtagaagcaataggttgagactgactgtaatgggtacttgcgttcaaagactgaaagtccaaaggattgctcaaaggcccctgaggtctgagcctctgagcgcgctcttcgtcaaaattcgccggggccatcggtcatcctctcgagggcagcatcttcctgcttgaagactgagtccgtctcagataacttcgtataatgtatgctatacgaagttatcctgcaggagctcagaccttgcatgttagccttgaccttgcctctatgaccactaattcgcacaagattgcacgttaccattgtcatcttgccatgtatccaatgtttcctgtttgccatagtacgtagtagatacatcgatcatcgatgcagatgacgcagatggcattggttcgctttgccctatgcatgcatcatgcatcatgcatcatgcgtcatgcgtcactatccatattaatcattgccctctgtactaggccatgacacctgcagacccttccccagggatgcttcttgtaatagccaatatactacacaactttaccgattacgatcgagatcgatctcactatagtttgtcgaacttcgatgcacatcgagggtgcggaaaaaagctgacggaagcggaagtgggtgaattggttaatttagttagattggcagggttgttcccaagattcaacgcaagctgagaaagaaaacagaaacacgaggcataaggccagtcagaaaatgcattacgaggggagttgaagtgactgtgggccagtgcctgggtcgtcatgtgcaaattttttcttcggttagactgccgcagcatgcagcaactctgccggccctatataactagtgcttcatcttcttgtcattcttgtctctttaccaacacaccggtactctttcaccatgggtaaggaaaagacacacgtatcgcgaccccgactcaactccaacatggacgcagacctgtacggatacaaatgggctcgagataatgtcggacagtcgggtgcgacgatctacagactctatggaaaaccggacgcccccgagctctttcttaaacacggcaagggtagcgttgcaaacgacgtaaccgacgaaatggtccgtctgaattggctaactgagttcatgccactccccaccatcaagcacttcatccgtacacctgacgatgcgtggctgttgactacggccatccccggtaagaccgcttttcaggtcctcgaggaataccctgactcgggcgagaacatcgtggatgccttggctgtgtttttgcgccgccttcactctattccggtctgcaactgccctttcaacagcgaccgtgtttttaggcttgcccaggcacaatcacgcatgaacaatggtctagtcgacgctagtgatttcgatgacgagcgcaacggctggccggtggaacaagtgtggaaagagatgcataagctcctgcccttttccccagactctgtcgtgacgcatggtgatttctcgcttgacaacctcatctttgacgagggcaagctcattggctgcattgacgtcggccgggttggcatcgccgatcgctaccaagatcttgcgatcctctggaattgtctgggcgagttctcccctagcctccagaagcgtctgttccagaaatatgggatcg

SEQ ID NO: 72 - DNA, 4573 bp, synthetic construct
  source 1..4573: mol_type = other DNA
tgcagagccttgcaaatgatgaaagaccaatggaattgatcattgattattgatgatgcatgatgaaagagatagaaacagatgcaagatgggatggcgcgatgatcaaatgataatgaacgttcaacccttcaaaattgaaactctcaggctgagcggctgagcaagctctgagaatgtgggtcttcgaagactttcgcttgagcatggtgcatgtgcaaagagatggaatgtggaattgttgtaggtaggaacacagcccggtagagcggcgcagtggctcagcgaagctgggagaacgactgaaccggtcttgagattcatcatctcagcgtgcgtcagcgcgtcagcttcagcgtttgagaatggcacggactgacctgtcgtacatcccaaggaggcccgtgcgctatactcgccttgtggcctaatctgcgatcaacccatcctcaacgaaagcgcaagtagcgactaagcacactatctttcgggtcggtgcggtcacagtatcggcatctctgtctttagctacgatggtgtgcgtgtaactgatcagtacacccgctgtatcaaaactctatcttcaatccgctaagaatcgtcaccatcagtacatcagtacatcagtgggctaagatctaatggtgtcgttcgacggccgcgggcactagccacgagccaagagcggtacagttgctgcgaaatggtgggcagcctgacaggttcagtttgaataggatgaaaacgccatgaagaacagagaagctggcaattgacgatagtggggcgagcgcacgctgcttgctggtccgagcgtaggacgaacgacaaaccatgggcggggccaccaggccccagggagggcgtcactggttggatgtcgtctgttaggctagagctcaggcgctcagggcctctggcccaagcctcggacgcaagcctctgacgagcgagcgcgcgctggggcgggtctgcgcaggaacggcaggactgccgagttggttgaatattgaatggttggatgattggtttgctgggtttggttttgacacgcacggcacaggacaagtgagtttggaggttggatttgcgcaggtagaaagggcgctcggcctcagggcctcagcgtcagcagacgagctcgccagtccaggtcagtacccagtgttcgttacttcccaccgtccagagtttgctgctgcctctcagcttgattcgtgtcggagaagtagaaatggtcacagcgtaccacacactgtccccatgcctgcgtcctgctccacgagtgtttagccacaaaaatttatggacaaccttactgagcctgtgctggggggtgctttagcaccagcactggcgccatggcgtcaaggttaattccactgtcattcgacaaccttcaactgatgggggcaactgggcacaaaaccttggatatataaccaactccaactcccacggttttttaccttttgctcttctccccaggactcactacttctactcctctattcatcttcaccaaaatgaaggcggcggtgcttcattctgagaatcacttcatttatgaagaaattgatattgctccttgtcaagatgatgaggttaaaatcaaagtcattgcgactggaatttgtggatcggacacgcacaagatgacaggcaaatggaaatatcctctccccgccgtgatgggacacgagttctccggatatatcgttgagaaaggaaagaacgtcactaatgcagccatcggtgaccgcgtcgtggcgatccctttcctcccgtgtaacgactgtgagtattgtaaacgtggccaatttagcctttgcgaagaccacggtatggtcggctcgaagtccttcggaggttttgctgagtacgttaatattgagtcttcgaatgtccttcccatcggagatatggaatttgaagaggcggccatgattgagccgctcgcggtggcccttcatggagtcttgaatattcatccgcgtgttggcgacgtcgcggccgtgttcggtgtcggtaccattggtatgctgaccatccagtggctgaaaattgcgggtgccaaggagatcatcgcaatcgacttgtcggatgaaaaacttgctgacgcgcgtgctatgggttgtgaacgtacgatcaatcccctgaacgaagaccttcttgaaaaaatcaacgaatacaccaacggaatgggagttgacatcgccttcgagtgtgctggctcgaagattacacaagaacagtgccttcttatcacccgcaagcaaggcaaaattggatacctgggcattgcttattccgatgtccacctgtctgagaaggctttcgagaacatttttcgacgcgagcttacgttgaaaggtttctggaattcgtattccgctccatttccgggtgaagaatggacaaaatcgattgaattcattaaaaacggccgcattaagttgaaggaactgatctctcaccgatttaagctggaggatacacaaaaagcatttgatatgatgatcaaccgtgaagagaaatatggtaaggttttgattcttccgaacgaggagtaacacggatcaacaaaaatgtgcgccagctttgttgtgtgcccttttcctctagcggatcctatccacatttcgtgaatgaaccgattaagctctgacgagatttccttgttttctgtagatacctcttgtagaggtgtcaaagttatgttgtgatcgagagagttacctgcaaggtattatgcaagcggcttgatgaggacactcaactacgtgtgagtaggagtgcgttgctcagcagttgacgcgtgagccgcttgagcagcttgataaaggtcctaatcgtcttccagctgttggcagacgacaatgtgctgtagtagtaggataggcccgtaaaagtgtagaagcaataggttgagactgactgtaatgggtacttgcgttcaaagactgaaagtccaaaggattgctcaaaggcccctgaggtctgagcctctgagcgcgctcttcgtcaaaattcgccggggccatcggtcatcctctcgagggcagcatcttcctgcttgaagactgagtccgtctcagataacttcgtataatgtatgctatacgaagttatcctgcaggagctcagaccttgcatgttagccttgaccttgcctctatgaccactaattcgcacaagattgcacgttaccattgtcatcttgccatgtatccaatgtttcctgtttgccatagtacgtagtagatacatcgatcatcgatgcagatgacgcagatggcattggttcgctttgccctatgcatgcatcatgcatcatgcatcatgcgtcatgcgtcactatccatattaatcattgccctctgtactaggccatgacacctgcagacccttccccagggatgcttcttgtaatagccaatatactacacaactttaccgattacgatcgagatcgatctcactatagtttgtcgaacttcgatgcacatcgagggtgcggaaaaaagctgacggaagcggaagtgggtgaattggttaatttagttagattggcagggttgttcccaagattcaacgcaagctgagaaagaaaacagaaacacgaggcataaggccagtcagaaaatgcattacgaggggagttgaagtgactgtgggccagtgcctgggtcgtcatgtgcaaattttttcttcggttagactgccgcagcatgcagcaactctgccggccctatataactagtgcttcatcttcttgtcattcttgtctctttaccaacacaccggtactctttcaccatgggtaaggaaaagacacacgtatcgcgaccccgactcaactccaacatggacgcagacctgtacggatacaaatgggctcgagataatgtcggacagtcgggtgcgacgatctacagactctatggaaaaccggacgcccccgagctctttcttaaacacggcaagggtagcgttgcaaacgacgtaaccgacgaaatggtccgtctgaattggctaactgagttcatgccactccccaccatcaagcacttcatccgtacacctgacgatgcgtggctgttgactacggccatccccggtaagaccgcttttcaggtcctcgaggaataccctgactcgggcgagaacatcgtggatgccttggctgtgtttttgcgccgccttcactctattccggtctgcaactgccctttcaacagcgaccgtgtttttaggcttgcccaggcacaatcacgcatgaacaatggtctagtcgacgctagtgatttcgatgacgagcgcaacggctggccggtggaacaagtgtggaaagagatgcataagctcctgcccttttccccagactctgtcgtgacgcatggtgatttctcgcttgacaacctcatctttgacgagggcaagctcattggctgcattgacgtcggccgggttggcatcgccgatcgctaccaagatcttgcgatcctctggaattgtctgggcgagttctcccctagcctccagaagcgtctgttccagaaatatgggatcg

SEQ ID NO: 73 - DNA, 4579 bp, synthetic construct
  source 1..4579: mol_type = other DNA
tgcagagccttgcaaatgatgaaagaccaatggaattgatcattgattattgatgatgcatgatgaaagagatagaaacagatgcaagatgggatggcgcgatgatcaaatgataatgaacgttcaacccttcaaaattgaaactctcaggctgagcggctgagcaagctctgagaatgtgggtcttcgaagactttcgcttgagcatggtgcatgtgcaaagagatggaatgtggaattgttgtaggtaggaacacagcccggtagagcggcgcagtggctcagcgaagctgggagaacgactgaaccggtcttgagattcatcatctcagcgtgcgtcagcgcgtcagcttcagcgtttgagaatggcacggactgacctgtcgtacatcccaaggaggcccgtgcgctatactcgccttgtggcctaatctgcgatcaacccatcctcaacgaaagcgcaagtagcgactaagcacactatctttcgggtcggtgcggtcacagtatcggcatctctgtctttagctacgatggtgtgcgtgtaactgatcagtacacccgctgtatcaaaactctatcttcaatccgctaagaatcgtcaccatcagtacatcagtacatcagtgggctaagatctaatggtgtcgttcgacggccgcgggcactagccacgagccaagagcggtacagttgctgcgaaatggtgggcagcctgacaggttcagtttgaataggatgaaaacgccatgaagaacagagaagctggcaattgacgatagtggggcgagcgcacgctgcttgctggtccgagcgtaggacgaacgacaaaccatgggcggggccaccaggccccagggagggcgtcactggttggatgtcgtctgttaggctagagctcaggcgctcagggcctctggcccaagcctcggacgcaagcctctgacgagcgagcgcgcgctggggcgggtctgcgcaggaacggcaggactgccgagttggttgaatattgaatggttggatgattggtttgctgggtttggttttgacacgcacggcacaggacaagtgagtttggaggttggatttgcgcaggtagaaagggcgctcggcctcagggcctcagcgtcagcagacgagctcgccagtccaggtcagtacccagtgttcgttacttcccaccgtccagagtttgctgctgcctctcagcttgattcgtgtcggagaagtagaaatggtcacagcgtaccacacactgtccccatgcctgcgtcctgctccacgagtgtttagccacaaaaatttatggacaaccttactgagcctgtgctggggggtgctttagcaccagcactggcgccatggcgtcaaggttaattccactgtcattcgacaaccttcaactgatgggggcaactgggcacaaaaccttggatatataaccaactccaactcccacggttttttaccttttgctcttctccccaggactcactacttctactcctctattcatcttcaccaaaatgaaggccgcggtcctgcactccgaaaatgagattatttaccaggacattgaaatttccgagtgtcaaccaaacgaagtgaaagttaaggtcatggcggctggaatctgtggttccgatacccataaaatggtgagcaaatggaaataccccctccctgcgatcatgggtcacgaatttgccggctacgtcgttgaaaaaggcaaagacgtgacgaacgtcgaaattggcgatcgtgttgccgctatcccgttcatcccatgcaacgagtgtgagtattgcctgcgaggtcagttcagcctttgcgaaaatcacggaatgatcggcagcaagtcctttggcgcatttgccgagtttgttaatattccagctaagaacgttctcccgattggcgaaatgtctttcgaagatgcagctatgatcgaaccgtctgcggtcagcctgcatggagtgctcaacattcacccacagctcggcgatgtcgttgctgtcttcggtgtgggaactattggaatcctcgcaattcagtggttgcgtgtcgccggcgtgaaagagattattgctattgacatttccgacaagaagctccaggacgctatggatctgggttgtgagaagtcgattaaccctttgaaggaagacttgattaagaaaatttatgaatacacgaatggcctcggcgttgacatcgcatttgaatgcgctggatctaaaattacgcaagaacagtgcctgctcattacccgtaaacaaggaaaggttggttatttgggaattgcgtacagcgatgttactctctctgaaaaagcctttgaaaatattttccgccgagagctcactctcaagggtttctggaattcgtattccgcgccgtttccaggaaaggagtggatgaacacgatcgagttcgtccaacagggcaaaattaagcttaaagaattggtgtcgcatcgctacaagctcgaagacacccagaaggcgtttaacatgatgatcaaccgagaagaagaatacaataaggtgatgatcatccccaacgaggaactggagtaacacggatcaacaaaaatgtgcgccagctttgttgtgtgcccttttcctctagcggatcctatccacatttcgtgaatgaaccgattaagctctgacgagatttccttgttttctgtagatacctcttgtagaggtgtcaaagttatgttgtgatcgagagagttacctgcaaggtattatgcaagcggcttgatgaggacactcaactacgtgtgagtaggagtgcgttgctcagcagttgacgcgtgagccgcttgagcagcttgataaaggtcctaatcgtcttccagctgttggcagacgacaatgtgctgtagtagtaggataggcccgtaaaagtgtagaagcaataggttgagactgactgtaatgggtacttgcgttcaaagactgaaagtccaaaggattgctcaaaggcccctgaggtctgagcctctgagcgcgctcttcgtcaaaattcgccggggccatcggtcatcctctcgagggcagcatcttcctgcttgaagactgagtccgtctcagataacttcgtataatgtatgctatacgaagttatcctgcaggagctcagaccttgcatgttagccttgaccttgcctctatgaccactaattcgcacaagattgcacgttaccattgtcatcttgccatgtatccaatgtttcctgtttgccatagtacgtagtagatacatcgatcatcgatgcagatgacgcagatggcattggttcgctttgccctatgcatgcatcatgcatcatgcatcatgcgtcatgcgtcactatccatattaatcattgccctctgtactaggccatgacacctgcagacccttccccagggatgcttcttgtaatagccaatatactacacaactttaccgattacgatcgagatcgatctcactatagtttgtcgaacttcgatgcacatcgagggtgcggaaaaaagctgacggaagcggaagtgggtgaattggttaatttagttagattggcagggttgttcccaagattcaacgcaagctgagaaagaaaacagaaacacgaggcataaggccagtcagaaaatgcattacgaggggagttgaagtgactgtgggccagtgcctgggtcgtcatgtgcaaattttttcttcggttagactgccgcagcatgcagcaactctgccggccctatataactagtgcttcatcttcttgtcattcttgtctctttaccaacacaccggtactctttcaccatgggtaaggaaaagacacacgtatcgcgaccccgactcaactccaacatggacgcagacctgtacggatacaaatgggctcgagataatgtcggacagtcgggtgcgacgatctacagactctatggaaaaccggacgcccccgagctctttcttaaacacggcaagggtagcgttgcaaacgacgtaaccgacgaaatggtccgtctgaattggctaactgagttcatgccactccccaccatcaagcacttcatccgtacacctgacgatgcgtggctgttgactacggccatccccggtaagaccgcttttcaggtcctcgaggaataccctgactcgggcgagaacatcgtggatgccttggctgtgtttttgcgccgccttcactctattccggtctgcaactgccctttcaacagcgaccgtgtttttaggcttgcccaggcacaatcacgcatgaacaatggtctagtcgacgctagtgatttcgatgacgagcgcaacggctggccggtggaacaagtgtggaaagagatgcataagctcctgcccttttccccagactctgtcgtgacgcatggtgatttctcgcttgacaacctcatctttgacgagggcaagctcattggctgcattgacgtcggccgggttggcatcgccgatcgctaccaagatcttgcgatcctctggaattgtctgggcgagttctcccctagcctccagaagcgtctgttccagaaatatgggatcg

SEQ ID NO: 74 - DNA, 4567 bp, synthetic construct
  source 1..4567: mol_type = other DNA
tgcagagccttgcaaatgatgaaagaccaatggaattgatcattgattattgatgatgcatgatgaaagagatagaaacagatgcaagatgggatggcgcgatgatcaaatgataatgaacgttcaacccttcaaaattgaaactctcaggctgagcggctgagcaagctctgagaatgtgggtcttcgaagactttcgcttgagcatggtgcatgtgcaaagagatggaatgtggaattgttgtaggtaggaacacagcccggtagagcggcgcagtggctcagcgaagctgggagaacgactgaaccggtcttgagattcatcatctcagcgtgcgtcagcgcgtcagcttcagcgtttgagaatggcacggactgacctgtcgtacatcccaaggaggcccgtgcgctatactcgccttgtggcctaatctgcgatcaacccatcctcaacgaaagcgcaagtagcgactaagcacactatctttcgggtcggtgcggtcacagtatcggcatctctgtctttagctacgatggtgtgcgtgtaactgatcagtacacccgctgtatcaaaactctatcttcaatccgctaagaatcgtcaccatcagtacatcagtacatcagtgggctaagatctaatggtgtcgttcgacggccgcgggcactagccacgagccaagagcggtacagttgctgcgaaatggtgggcagcctgacaggttcagtttgaataggatgaaaacgccatgaagaacagagaagctggcaattgacgatagtggggcgagcgcacgctgcttgctggtccgagcgtaggacgaacgacaaaccatgggcggggccaccaggccccagggagggcgtcactggttggatgtcgtctgttaggctagagctcaggcgctcagggcctctggcccaagcctcggacgcaagcctctgacgagcgagcgcgcgctggggcgggtctgcgcaggaacggcaggactgccgagttggttgaatattgaatggttggatgattggtttgctgggtttggttttgacacgcacggcacaggacaagtgagtttggaggttggatttgcgcaggtagaaagggcgctcggcctcagggcctcagcgtcagcagacgagctcgccagtccaggtcagtacccagtgttcgttacttcccaccgtccagagtttgctgctgcctctcagcttgattcgtgtcggagaagtagaaatggtcacagcgtaccacacactgtccccatgcctgcgtcctgctccacgagtgtttagccacaaaaatttatggacaaccttactgagcctgtgctggggggtgctttagcaccagcactggcgccatggcgtcaaggttaattccactgtcattcgacaaccttcaactgatgggggcaactgggcacaaaaccttggatatataaccaactccaactcccacggttttttaccttttgctcttctccccaggactcactacttctactcctctattcatcttcaccaaaatgaaggcagcggtgcttcattcggtcggagacatccgctacgaaaacatcgagatcaagccttacggagacgatgaagtgaaaatcaaagttaaagccgccggtatctgtggatctgacccgccacgtgcactcaaaaagtggaaatatcccgtgccagccattttgggtcacgagttctcgggttatatcgttgaagtgggaaagaacgtgaagggttttaaagtgggagatcgtgtcgttgccgtccctctggaaccgtgtcaccaatgtgaatactgcaagaaaggccaattttcgctctgcgaaagctacgatatgttgggtgctacttcctttggcggttttgcagagtacgctaacgtgaaggcaacaaatgttttgaaaattgacgatatcgactatgaagaggcggccatgattgaacctctcgcagtcgcactgcatggtgtgcttaatatcaatccgcaactcggtgatactgttgctgttttgggagctggaacgatcggtcaactcacgattcaatggctcaaggtttcgggagtcgagaagattatcgcagtcgacatttcggacaaaaaaattagcgaagctatgtccttgggagcagatattggtattaatgctcttaaagagaatccggtcgaaaagatcatggaacttacaaacggtttcggcgtggatatctgcattgaatgcgccggctctaagatcactcaggaacaatgtctgttggtcacgaagaaaaaaggtaagattggatatcagggtatcggtcacgccggaattgagttgtctgaagttgctttcgagggtattttccgtaaagaattgaacatccaaggtttttggaatagctacagcgccccgttccccggacaggaatggttcaaaagcatcgagtatgttaagcagaaaaaaatcaagctcaaacagttgatcagccatcgcttcagccttgaagacacagcgaaagcttttgagatgattggtgaacgtaaggaggagtataacaagatcatgattgtccaggactaacacggatcaacaaaaatgtgcgccagctttgttgtgtgcccttttcctctagcggatcctatccacatttcgtgaatgaaccgattaagctctgacgagatttccttgttttctgtagatacctcttgtagaggtgtcaaagttatgttgtgatcgagagagttacctgcaaggtattatgcaagcggcttgatgaggacactcaactacgtgtgagtaggagtgcgttgctcagcagttgacgcgtgagccgcttgagcagcttgataaaggtcctaatcgtcttccagctgttggcagacgacaatgtgctgtagtagtaggataggcccgtaaaagtgtagaagcaataggttgagactgactgtaatgggtacttgcgttcaaagactgaaagtccaaaggattgctcaaaggcccctgaggtctgagcctctgagcgcgctcttcgtcaaaattcgccggggccatcggtcatcctctcgagggcagcatcttcctgcttgaagactgagtccgtctcagataacttcgtataatgtatgctatacgaagttatcctgcaggagctcagaccttgcatgttagccttgaccttgcctctatgaccactaattcgcacaagattgcacgttaccattgtcatcttgccatgtatccaatgtttcctgtttgccatagtacgtagtagatacatcgatcatcgatgcagatgacgcagatggcattggttcgctttgccctatgcatgcatcatgcatcatgcatcatgcgtcatgcgtcactatccatattaatcattgccctctgtactaggccatgacacctgcagacccttccccagggatgcttcttgtaatagccaatatactacacaactttaccgattacgatcgagatcgatctcactatagtttgtcgaacttcgatgcacatcgagggtgcggaaaaaagctgacggaagcggaagtgggtgaattggttaatttagttagattggcagggttgttcccaagattcaacgcaagctgagaaagaaaacagaaacacgaggcataaggccagtcagaaaatgcattacgaggggagttgaagtgactgtgggccagtgcctgggtcgtcatgtgcaaattttttcttcggttagactgccgcagcatgcagcaactctgccggccctatataactagtgcttcatcttcttgtcattcttgtctctttaccaacacaccggtactctttcaccatgggtaaggaaaagacacacgtatcgcgaccccgactcaactccaacatggacgcagacctgtacggatacaaatgggctcgagataatgtcggacagtcgggtgcgacgatctacagactctatggaaaaccggacgcccccgagctctttcttaaacacggcaagggtagcgttgcaaacgacgtaaccgacgaaatggtccgtctgaattggctaactgagttcatgccactccccaccatcaagcacttcatccgtacacctgacgatgcgtggctgttgactacggccatccccggtaagaccgcttttcaggtcctcgaggaataccctgactcgggcgagaacatcgtggatgccttggctgtgtttttgcgccgccttcactctattccggtctgcaactgccctttcaacagcgaccgtgtttttaggcttgcccaggcacaatcacgcatgaacaatggtctagtcgacgctagtgatttcgatgacgagcgcaacggctggccggtggaacaagtgtggaaagagatgcataagctcctgcccttttccccagactctgtcgtgacgcatggtgatttctcgcttgacaacctcatctttgacgagggcaagctcattggctgcattgacgtcggccgggttggcatcgccgatcgctaccaagatcttgcgatcctctggaattgtctgggcgagttctcccctagcctccagaagcgtctgttccagaaatatgggatcg

SEQ ID NO: 75 - DNA, 4573 bp, synthetic construct
  source 1..4573: mol_type = other DNA
tgcagagccttgcaaatgatgaaagaccaatggaattgatcattgattattgatgatgcatgatgaaagagatagaaacagatgcaagatgggatggcgcgatgatcaaatgataatgaacgttcaacccttcaaaattgaaactctcaggctgagcggctgagcaagctctgagaatgtgggtcttcgaagactttcgcttgagcatggtgcatgtgcaaagagatggaatgtggaattgttgtaggtaggaacacagcccggtagagcggcgcagtggctcagcgaagctgggagaacgactgaaccggtcttgagattcatcatctcagcgtgcgtcagcgcgtcagcttcagcgtttgagaatggcacggactgacctgtcgtacatcccaaggaggcccgtgcgctatactcgccttgtggcctaatctgcgatcaacccatcctcaacgaaagcgcaagtagcgactaagcacactatctttcgggtcggtgcggtcacagtatcggcatctctgtctttagctacgatggtgtgcgtgtaactgatcagtacacccgctgtatcaaaactctatcttcaatccgctaagaatcgtcaccatcagtacatcagtacatcagtgggctaagatctaatggtgtcgttcgacggccgcgggcactagccacgagccaagagcggtacagttgctgcgaaatggtgggcagcctgacaggttcagtttgaataggatgaaaacgccatgaagaacagagaagctggcaattgacgatagtggggcgagcgcacgctgcttgctggtccgagcgtaggacgaacgacaaaccatgggcggggccaccaggccccagggagggcgtcactggttggatgtcgtctgttaggctagagctcaggcgctcagggcctctggcccaagcctcggacgcaagcctctgacgagcgagcgcgcgctggggcgggtctgcgcaggaacggcaggactgccgagttggttgaatattgaatggttggatgattggtttgctgggtttggttttgacacgcacggcacaggacaagtgagtttggaggttggatttgcgcaggtagaaagggcgctcggcctcagggcctcagcgtcagcagacgagctcgccagtccaggtcagtacccagtgttcgttacttcccaccgtccagagtttgctgctgcctctcagcttgattcgtgtcggagaagtagaaatggtcacagcgtaccacacactgtccccatgcctgcgtcctgctccacgagtgtttagccacaaaaatttatggacaaccttactgagcctgtgctggggggtgctttagcaccagcactggcgccatggcgtcaaggttaattccactgtcattcgacaaccttcaactgatgggggcaactgggcacaaaaccttggatatataaccaactccaactcccacggttttttaccttttgctcttctccccaggactcactacttctactcctctattcatcttcaccaaaatgaaagcagcagttttgcattccgagaatcacttcatttatcaggatatggagagcttcgagtgccagaatgacgaagtcaagatcaaggttatggctgccggcatctgcggaagcgatacgcataaaatggtttcgaaatggaaatatcccttgcctgcaattatgggacatgagttctccggttacgtcgtcgaaaagggtagcgatgtggcaaacgtcgagatcggcgaccgagtggttgccattccattcttgccctgtcacacttgtgagtattgcaagtccggtgtttattctttgtgtgaagatcacggtatgatcggttccaagagctacggtggcttcgcggagtatgtcaatctcaaggcaaccaacgtccttccaattggaaacatggattttgaggaggccgctatgatcgaaccgcttgcagtcgccctccacggcgttctccatattcagccgcgtctcggtgacgtggccgccgtttttggagtcggcaccattggcatgttggccatccaatggctgaagattgcgggagtgaaagaaattatcgctattgatatttcggatgagaagttggcggaagcgaaagccatgggatgcgaacgaacgattaatcccctccaagacaatctcatcgaaaaggtccacgagtataccaacggcttgggcgtggatgtcgccctcgagtgcgcgggatctaagattacacaggaacaatgtcttttgatcactcgcaaaaagggtgaaattggttacttgggaatcgcgtattctaatgtggttttgagcgaacaagcttttgagaacatctttcgtaaagagcttacgttgaagggtttttggaattgttatagcgctcccttccctggcgaggagtggacgaaatctatcgacttcattctgaagggccgcatcaagctgaaggagcttatcagccaccgctttcccctggaagaaacgcagaaggcattcgacctgatgattaatcgaaaagaaacctatggtaaggtgatgatcatccccaataaggaataacacggatcaacaaaaatgtgcgccagctttgttgtgtgcccttttcctctagcggatcctatccacatttcgtgaatgaaccgattaagctctgacgagatttccttgttttctgtagatacctcttgtagaggtgtcaaagttatgttgtgatcgagagagttacctgcaaggtattatgcaagcggcttgatgaggacactcaactacgtgtgagtaggagtgcgttgctcagcagttgacgcgtgagccgcttgagcagcttgataaaggtcctaatcgtcttccagctgttggcagacgacaatgtgctgtagtagtaggataggcccgtaaaagtgtagaagcaataggttgagactgactgtaatgggtacttgcgttcaaagactgaaagtccaaaggattgctcaaaggcccctgaggtctgagcctctgagcgcgctcttcgtcaaaattcgccggggccatcggtcatcctctcgagggcagcatcttcctgcttgaagactgagtccgtctcagataacttcgtataatgtatgctatacgaagttatcctgcaggagctcagaccttgcatgttagccttgaccttgcctctatgaccactaattcgcacaagattgcacgttaccattgtcatcttgccatgtatccaatgtttcctgtttgccatagtacgtagtagatacatcgatcatcgatgcagatgacgcagatggcattggttcgctttgccctatgcatgcatcatgcatcatgcatcatgcgtcatgcgtcactatccatattaatcattgccctctgtactaggccatgacacctgcagacccttccccagggatgcttcttgtaatagccaatatactacacaactttaccgattacgatcgagatcgatctcactatagtttgtcgaacttcgatgcacatcgagggtgcggaaaaaagctgacggaagcggaagtgggtgaattggttaatttagttagattggcagggttgttcccaagattcaacgcaagctgagaaagaaaacagaaacacgaggcataaggccagtcagaaaatgcattacgaggggagttgaagtgactgtgggccagtgcctgggtcgtcatgtgcaaattttttcttcggttagactgccgcagcatgcagcaactctgccggccctatataactagtgcttcatcttcttgtcattcttgtctctttaccaacacaccggtactctttcaccatgggtaaggaaaagacacacgtatcgcgaccccgactcaactccaacatggacgcagacctgtacggatacaaatgggctcgagataatgtcggacagtcgggtgcgacgatctacagactctatggaaaaccggacgcccccgagctctttcttaaacacggcaagggtagcgttgcaaacgacgtaaccgacgaaatggtccgtctgaattggctaactgagttcatgccactccccaccatcaagcacttcatccgtacacctgacgatgcgtggctgttgactacggccatccccggtaagaccgcttttcaggtcctcgaggaataccctgactcgggcgagaacatcgtggatgccttggctgtgtttttgcgccgccttcactctattccggtctgcaactgccctttcaacagcgaccgtgtttttaggcttgcccaggcacaatcacgcatgaacaatggtctagtcgacgctagtgatttcgatgacgagcgcaacggctggccggtggaacaagtgtggaaagagatgcataagctcctgcccttttccccagactctgtcgtgacgcatggtgatttctcgcttgacaacctcatctttgacgagggcaagctcattggctgcattgacgtcggccgggttggcatcgccgatcgctaccaagatcttgcgatcctctggaattgtctgggcgagttctcccctagcctccagaagcgtctgttccagaaatatgggatcg

SEQ ID NO: 76 - DNA, 4573 bp, synthetic construct
  source 1..4573: mol_type = other DNA
tgcagagccttgcaaatgatgaaagaccaatggaattgatcattgattattgatgatgcatgatgaaagagatagaaacagatgcaagatgggatggcgcgatgatcaaatgataatgaacgttcaacccttcaaaattgaaactctcaggctgagcggctgagcaagctctgagaatgtgggtcttcgaagactttcgcttgagcatggtgcatgtgcaaagagatggaatgtggaattgttgtaggtaggaacacagcccggtagagcggcgcagtggctcagcgaagctgggagaacgactgaaccggtcttgagattcatcatctcagcgtgcgtcagcgcgtcagcttcagcgtttgagaatggcacggactgacctgtcgtacatcccaaggaggcccgtgcgctatactcgccttgtggcctaatctgcgatcaacccatcctcaacgaaagcgcaagtagcgactaagcacactatctttcgggtcggtgcggtcacagtatcggcatctctgtctttagctacgatggtgtgcgtgtaactgatcagtacacccgctgtatcaaaactctatcttcaatccgctaagaatcgtcaccatcagtacatcagtacatcagtgggctaagatctaatggtgtcgttcgacggccgcgggcactagccacgagccaagagcggtacagttgctgcgaaatggtgggcagcctgacaggttcagtttgaataggatgaaaacgccatgaagaacagagaagctggcaattgacgatagtggggcgagcgcacgctgcttgctggtccgagcgtaggacgaacgacaaaccatgggcggggccaccaggccccagggagggcgtcactggttggatgtcgtctgttaggctagagctcaggcgctcagggcctctggcccaagcctcggacgcaagcctctgacgagcgagcgcgcgctggggcgggtctgcgcaggaacggcaggactgccgagttggttgaatattgaatggttggatgattggtttgctgggtttggttttgacacgcacggcacaggacaagtgagtttggaggttggatttgcgcaggtagaaagggcgctcggcctcagggcctcagcgtcagcagacgagctcgccagtccaggtcagtacccagtgttcgttacttcccaccgtccagagtttgctgctgcctctcagcttgattcgtgtcggagaagtagaaatggtcacagcgtaccacacactgtccccatgcctgcgtcctgctccacgagtgtttagccacaaaaatttatggacaaccttactgagcctgtgctggggggtgctttagcaccagcactggcgccatggcgtcaaggttaattccactgtcattcgacaaccttcaactgatgggggcaactgggcacaaaaccttggatatataaccaactccaactcccacggttttttaccttttgctcttctccccaggactcactacttctactcctctattcatcttcaccaaaatgaaagcagcagtgctccattctgagaatcagatcgtgtttcaagaatttgagatcggcgaacttaagccagacgaagttaaggtcaaagtgatggcagcgggcatctgtggctcggatacccacaagatggtgtcgaagtggaagtatcccttgccagcaatcatgggtcatgagtttgccggctatattgtcgaaaagggaaaagatgtggtgcatgtggaagtcggtgatcgtgtggcaggcatcccttttgtgccttgtaatgactgtgagtactgttttcgcggtcagttttccctttgcgagaatcacggtatggtgggttctaagtctttcggagcctttgcggaatatgttaacattccagccaaaaacgtgctgccgattggagacatggattttgaggacgcggcgatgattgagccttcggccgttgccctccatggagtcttgaacattcacccccaaatcggtgatgttgtggcggtttttggagttggcaccattggaatccttgcactccagtggttgaaagttgccggtgttaaagaaattattgccattgacatctcggacaagaagctccaggatgccatcgccctcggatgtgagcgcacgattaatccattgaaagagaatttgctggaaaaaattcatgagtatacgaatggtcttggagtggacatcgccattgaatgtgcgggcagcaagattacacaagaacagtgtcttcttattacgcgcaagcagggcaaagtcggctatcttggcatcgcttactccgatattaatctgtcggaaaaagcatttgaaaacatcttccgccgcgaactcaaaattaatggtttctggaattcttattcggctccgttcccaggtaaagagtggacaaacaccgtggagtatgtgaagcaaggcaagattaagctgaaggagcttatttcccaccgattcggactggaagacacgcagcaagcatttaatatgattatcaaccgagaggaggaatataataaagttatgattgtcccaaacggcgagtaacacggatcaacaaaaatgtgcgccagctttgttgtgtgcccttttcctctagcggatcctatccacatttcgtgaatgaaccgattaagctctgacgagatttccttgttttctgtagatacctcttgtagaggtgtcaaagttatgttgtgatcgagagagttacctgcaaggtattatgcaagcggcttgatgaggacactcaactacgtgtgagtaggagtgcgttgctcagcagttgacgcgtgagccgcttgagcagcttgataaaggtcctaatcgtcttccagctgttggcagacgacaatgtgctgtagtagtaggataggcccgtaaaagtgtagaagcaataggttgagactgactgtaatgggtacttgcgttcaaagactgaaagtccaaaggattgctcaaaggcccctgaggtctgagcctctgagcgcgctcttcgtcaaaattcgccggggccatcggtcatcctctcgagggcagcatcttcctgcttgaagactgagtccgtctcagataacttcgtataatgtatgctatacgaagttatcctgcaggagctcagaccttgcatgttagccttgaccttgcctctatgaccactaattcgcacaagattgcacgttaccattgtcatcttgccatgtatccaatgtttcctgtttgccatagtacgtagtagatacatcgatcatcgatgcagatgacgcagatggcattggttcgctttgccctatgcatgcatcatgcatcatgcatcatgcgtcatgcgtcactatccatattaatcattgccctctgtactaggccatgacacctgcagacccttccccagggatgcttcttgtaatagccaatatactacacaactttaccgattacgatcgagatcgatctcactatagtttgtcgaacttcgatgcacatcgagggtgcggaaaaaagctgacggaagcggaagtgggtgaattggttaatttagttagattggcagggttgttcccaagattcaacgcaagctgagaaagaaaacagaaacacgaggcataaggccagtcagaaaatgcattacgaggggagttgaagtgactgtgggccagtgcctgggtcgtcatgtgcaaattttttcttcggttagactgccgcagcatgcagcaactctgccggccctatataactagtgcttcatcttcttgtcattcttgtctctttaccaacacaccggtactctttcaccatgggtaaggaaaagacacacgtatcgcgaccccgactcaactccaacatggacgcagacctgtacggatacaaatgggctcgagataatgtcggacagtcgggtgcgacgatctacagactctatggaaaaccggacgcccccgagctctttcttaaacacggcaagggtagcgttgcaaacgacgtaaccgacgaaatggtccgtctgaattggctaactgagttcatgccactccccaccatcaagcacttcatccgtacacctgacgatgcgtggctgttgactacggccatccccggtaagaccgcttttcaggtcctcgaggaataccctgactcgggcgagaacatcgtggatgccttggctgtgtttttgcgccgccttcactctattccggtctgcaactgccctttcaacagcgaccgtgtttttaggcttgcccaggcacaatcacgcatgaacaatggtctagtcgacgctagtgatttcgatgacgagcgcaacggctggccggtggaacaagtgtggaaagagatgcataagctcctgcccttttccccagactctgtcgtgacgcatggtgatttctcgcttgacaacctcatctttgacgagggcaagctcattggctgcattgacgtcggccgggttggcatcgccgatcgctaccaagatcttgcgatcctctggaattgtctgggcgagttctcccctagcctccagaagcgtctgttccagaaatatgggatcg

SEQ ID NO: 77 - DNA, 4533 bp, synthetic construct
  source 1..4533: mol_type = other DNA
tgcagagccttgcaaatgatgaaagaccaatggaattgatcattgattattgatgatgcatgatgaaagagatagaaacagatgcaagatgggatggcgcgatgatcaaatgataatgaacgttcaacccttcaaaattgaaactctcaggctgagcggctgagcaagctctgagaatgtgggtcttcgaagactttcgcttgagcatggtgcatgtgcaaagagatggaatgtggaattgttgtaggtaggaacacagcccggtagagcggcgcagtggctcagcgaagctgggagaacgactgaaccggtcttgagattcatcatctcagcgtgcgtcagcgcgtcagcttcagcgtttgagaatggcacggactgacctgtcgtacatcccaaggaggcccgtgcgctatactcgccttgtggcctaatctgcgatcaacccatcctcaacgaaagcgcaagtagcgactaagcacactatctttcgggtcggtgcggtcatttagctacgatggtgtgcgtgtaactgatcagtacacccgctgtatcaaaactctatcttcaatccgctaagaatcgtcaccatcagtacatcagtacatcagtgggctaagatctaatggtgtcgttcgacggccgcgggcactagccacgagccaagagcggtacagttgctgcgaaatggtgggcagcctgacaggttcagtttgaataggatgaaaacgccatgaagaacagagaagctggcaattgacgatagtggggcgagcgcacgctgcttgctggtccgagcgtaggacgaacgacaaaccatgggcggggccaccaggccccagggagggcgtcactggttggatgtcgtctgttaggctagagctcaggcgctcagggcctctggcccaagcctcggacgcaagcctctgacgagcgagcgcgcgctggggcgggtctgcgcaggaacggcaggactgccgagttggttgaatattgaatggttggatgattggtttgctgggtttggttttgacacgcacggcacaggacaagtgagtttggaggttggatttgcgcaggtagaaagggcgctcggcctcagggcctcagcgtcagcagacgagctcgccagtccaggtcagtacccagtgttcgttacttcccaccgtccagagtttgctgctgcctctcagcttgattcgtgtcggagaagtagaaatggtcacagcgtaccacacactgtccccatgcctgcgtcctgctccacgagtgtttagccacaaaaatttatggacaaccttactgagcctgtgctggggggtgctttagcaccagcactggcgccatggcgtcaaggttaattccactgtcattcgacaaccttcaactgatgggggcaactgggcacaaaaccttggatatataaccaactccaactcccacggttttttaccttttgctcttctccccaggactcactacttctactcctctattcatcttcaccaaaatgattaatcaggtttaccagctggtggcgccgcgccagttcgacgtcacgtataataacgtggacatttacggcaaccacgttatcgtccgaccgctgtatctctcgatctgcgcggccgatcaacgatactataccggacgtcgtgatgagaatgtgctgcgaaaaaaattgccaatgtctctggtccatgaagccgttggtgaggttgtttttgatagcaagggagtgtttgagaagggcacaaaggttgttatggtcccaaatacgcctacggagcaacaccatattatcgccgagaactacctggcgtcttcgtatttccgctcgagcggttacgatggtttcatgcaggattatgttgttatggcgcatgaccgtattgtcccgctgcccaacgatattgacctgagcactatttcctatacagaattggtttcggttagctaccacgccattcaacgtttcgagcgtaagtccattccgctcaagaatagcttcggtatttggggagacggtaatttgggctacatcactgcaatccttcttcgcaagctctacccggaggcaaaaatttatgtcttcggaaaaacggattataaactttctcatttcagcttcgttgatgacatcttcacggtgaaccaaatccccgatgatttgaagattgaccacgccttcgagtgcgttggcggaaagggctcgcaagttgcgttgcagcaaatcgttgagcatatctcccctgaaggttctattgctctcttgggcgtgtccgaactccccgtcgaagttaacacccgactcgtgttggaaaagggcttgaccctgattggatcctctcgttccggttccaaggactttgagcaggttgtcgacctctatcgaaaatatcccgatattgtcgagaaactcgcacttttgaaaggccacgaaattaatgtttgtacacttcaggatatcgtgcaggcatttgaaatggacctctctacgtcttggggcaagacagttttgaagtggacgatctaacacggatcaacaaaaatgtgcgccagctttgttgtgtgcccttttcctctagcggatcctatccacatttcgtgaatgaaccgattaagctctgacgagatttccttgttttctgtagatacctcttgtagaggtgtcaaagttatgttgtgatcgagagagttacctgcaaggtattatgcaagcggcttgatgaggacactcaactacgtgtgagtaggagtgcgttgctcagcagttgacgcgtgagccgcttgagcagcttgataaaggtcctaatcgtcttccagctgttggcagacgacaatgtgctgtagtagtaggataggcccgtaaaagtgtagaagcaataggttgagactgactgtaatgggtacttgcgttcaaagactgaaagtccaaaggattgctcaaaggcccctgaggtctgagcctctgagcgcgctcttcgtcaaaattcgccggggccatcggtcatcctctcgagggcagcatcttcctgcttgaagactgagtccgtctcagataacttcgtataatgtatgctatacgaagttatcctgcaggagctcagaccttgcatgttagccttgaccttgcctctatgaccactaattcgcacaagattgcacgttaccattgtcatcttgccatgtatccaatgtttcctgtttgccatagtacgtagtagatacatcgatcatcgatgcagatgacgcagatggcattggttcgctttgccctatgcatgcatcatgcatcatgcatcatgcgtcatgcgtcactatccatattaatcattgccctctgtactaggccatgacacctgcagacccttccccagggatgcttcttgtaatagccaatatactacacaactttaccgattacgatcgagatcgatctcactatagtttgtcgaacttcgatgcacatcgagggtgcggaaaaaagctgacggaagcggaagtgggtgaattggttaatttagttagattggcagggttgttcccaagattcaacgcaagctgagaaagaaaacagaaacacgaggcataaggccagtcagaaaatgcattacgaggggagttgaagtgactgtgggccagtgcctgggtcgtcatgtgcaaattttttcttcggttagactgccgcagcatgcagcaactctgccggccctatataactagtgcttcatcttcttgtcattcttgtctctttaccaacacaccggtactctttcaccatgggtaaggaaaagacacacgtatcgcgaccccgactcaactccaacatggacgcagacctgtacggatacaaatgggctcgagataatgtcggacagtcgggtgcgacgatctacagactctatggaaaaccggacgcccccgagctctttcttaaacacggcaagggtagcgttgcaaacgacgtaaccgacgaaatggtccgtctgaattggctaactgagttcatgccactccccaccatcaagcacttcatccgtacacctgacgatgcgtggctgttgactacggccatccccggtaagaccgcttttcaggtcctcgaggaataccctgactcgggcgagaacatcgtggatgccttggctgtgtttttgcgccgccttcactctattccggtctgcaactgccctttcaacagcgaccgtgtttttaggcttgcccaggcacaatcacgcatgaacaatggtctagtcgacgctagtgatttcgatgacgagcgcaacggctggccggtggaacaagtgtggaaagagatgcataagctcctgcccttttccccagactctgtcgtgacgcatggtgatttctcgcttgacaacctcatctttgacgagggcaagctcattggctgcattgacgtcggccgggttggcatcgccgatcgctaccaagatcttgcgatcctctggaattgtctgggcgagttctcccctagcctccagaagcgtctgttccagaaatatgggatcg

SEQ ID NO: 78 - DNA, 4633 bp, synthetic construct
  source 1..4633: mol_type = other DNA
tgcagagccttgcaaatgatgaaagaccaatggaattgatcattgattattgatgatgcatgatgaaagagatagaaacagatgcaagatgggatggcgcgatgatcaaatgataatgaacgttcaacccttcaaaattgaaactctcaggctgagcggctgagcaagctctgagaatgtgggtcttcgaagactttcgcttgagcatggtgcatgtgcaaagagatggaatgtggaattgttgtaggtaggaacacagcccggtagagcggcgcagtggctcagcgaagctgggagaacgactgaaccggtcttgagattcatcatctcagcgtgcgtcagcgcgtcagcttcagcgtttgagaatggcacggactgacctgtcgtacatcccaaggaggcccgtgcgctatactcgccttgtggcctaatctgcgatcaacccatcctcaacgaaagcgcaagtagcgactaagcacactatctttcgggtcggtgcggtcacagtatcggcatctctgtctttagctacgatggtgtgcgtgtaactgatcagtacacccgctgtatcaaaactctatcttcaatccgctaagaatcgtcaccatcagtacatcagtacatcagtgggctaagatctaatggtgtcgttcgacggccgcgggcactagccacgagccaagagcggtacagttgctgcgaaatggtgggcagcctgacaggttcagtttgaataggatgaaaacgccatgaagaacagagaagctggcaattgacgatagtggggcgagcgcacgctgcttgctggtccgagcgtaggacgaacgacaaaccatgggcggggccaccaggccccagggagggcgtcactggttggatgtcgtctgttaggctagagctcaggcgctcagggcctctggcccaagcctcggacgcaagcctctgacgagcgagcgcgcgctggggcgggtctgcgcaggaacggcaggactgccgagttggttgaatattgaatggttggatgattggtttgctgggtttggttttgacacgcacggcacaggacaagtgagtttggaggttggatttgcgcaggtagaaagggcgctcggcctcagggcctcagcgtcagcagacgagctcgccagtccaggtcagtacccagtgttcgttacttcccaccgtccagagtttgctgctgcctctcagcttgattcgtgtcggagaagtagaaatggtcacagcgtaccacacactgtccccatgcctgcgtcctgctccacgagtgtttagccacaaaaatttatggacaaccttactgagcctgtgctggggggtgctttagcaccagcactggcgccatggcgtcaaggttaattccactgtcattcgacaaccttcaactgatgggggcaactgggcacaaaaccttggatatataaccaactccaactcccacggttttttaccttttgctcttctccccaggactcactacttctactcctctattcatcttcaccaaaatgtgagacctaatatcactgctgtacagacaagactgtgtatattaggtctcaatgttgttgtttgaagttgttctcccaatgatcaaccaagtttatcaacttgtcgcaccccgccaatttgaggtgacgtacaataacgtggacatttacagcgactatgttattgtccgacctctttacatgagcatttgcgctgccgaccagcgatactacaccggatcgcgtgacgagaatgtcctttcccaaaaactgcctatgtctctcattcacgaaggagtgggtgaggttgttttcgattccaagggagtctttaataagggcactaaggtggttatggtccccaatacaccgaccgagaaagacgacgtgattgcagagaattatcttaaaagctcgtattttcgttcctccggccatgacggtttcatgcaggacttcgttctccttaatcacgatcgagctgtcccgctgccggacgacatcgatctctccatcatttcctacacagagttggtgacagtttctctccatgccatccgccgatttgaaaaaaaatccatcagcaataaaaacaccttcggcatttggggagacggaaatcttggttatattaccgcaattctcctgcgcaagctctacccagaatctaaaatttacgtgtttggtaaaactgattataaactgagccatttctccttcgtggacgacgttttcttcatcaataagattcctgaaggacttacctttgatcacgcctttgagtgcgtcggtggacgaggctctcaatccgcaattaaccaaatgattgactatatttcgcccgaaggtagcatcgccttgctcggtgtttccgagttcccggttgaggtcaatacgcgcctcgtcctcgagaagggactgaccttgatcggctcttctcgctctggttctaaagactttcaagacgtggttgacctctatattcaatacccggatattgtcgacaaattggcgctccttaaaggacaggagttcgaaattgccacaattaatgacctgacagaggcgtttgaggctgacctctccacctcctggggaaagacggttttgaagtggattatgtaacacggatcaacaaaaatgtgcgccagctttgttgtgtgcccttttcctctagcggatcctatccacatttcgtgaatgaaccgattaagctctgacgagatttccttgttttctgtagatacctcttgtagaggtgtcaaagttatgttgtgatcgagagagttacctgcaaggtattatgcaagcggcttgatgaggacactcaactacgtgtgagtaggagtgcgttgctcagcagttgacgcgtgagccgcttgagcagcttgataaaggtcctaatcgtcttccagctgttggcagacgacaatgtgctgtagtagtaggataggcccgtaaaagtgtagaagcaataggttgagactgactgtaatgggtacttgcgttcaaagactgaaagtccaaaggattgctcaaaggcccctgaggtctgagcctctgagcgcgctcttcgtcaaaattcgccggggccatcggtcatcctctcgagggcagcatcttcctgcttgaagactgagtccgtctcagataacttcgtataatgtatgctatacgaagttatcctgcaggagctcagaccttgcatgttagccttgaccttgcctctatgaccactaattcgcacaagattgcacgttaccattgtcatcttgccatgtatccaatgtttcctgtttgccatagtacgtagtagatacatcgatcatcgatgcagatgacgcagatggcattggttcgctttgccctatgcatgcatcatgcatcatgcatcatgcgtcatgcgtcactatccatattaatcattgccctctgtactaggccatgacacctgcagacccttccccagggatgcttcttgtaatagccaatatactacacaactttaccgattacgatcgagatcgatctcactatagtttgtcgaacttcgatgcacatcgagggtgcggaaaaaagctgacggaagcggaagtgggtgaattggttaatttagttagattggcagggttgttcccaagattcaacgcaagctgagaaagaaaacagaaacacgaggcataaggccagtcagaaaatgcattacgaggggagttgaagtgactgtgggccagtgcctgggtcgtcatgtgcaaattttttcttcggttagactgccgcagcatgcagcaactctgccggccctatataactagtgcttcatcttcttgtcattcttgtctctttaccaacacaccggtactctttcaccatgggtaaggaaaagacacacgtatcgcgaccccgactcaactccaacatggacgcagacctgtacggatacaaatgggctcgagataatgtcggacagtcgggtgcgacgatctacagactctatggaaaaccggacgcccccgagctctttcttaaacacggcaagggtagcgttgcaaacgacgtaaccgacgaaatggtccgtctgaattggctaactgagttcatgccactccccaccatcaagcacttcatccgtacacctgacgatgcgtggctgttgactacggccatccccggtaagaccgcttttcaggtcctcgaggaataccctgactcgggcgagaacatcgtggatgccttggctgtgtttttgcgccgccttcactctattccggtctgcaactgccctttcaacagcgaccgtgtttttaggcttgcccaggcacaatcacgcatgaacaatggtctagtcgacgctagtgatttcgatgacgagcgcaacggctggccggtggaacaagtgtggaaagagatgcataagctcctgcccttttccccagactctgtcgtgacgcatggtgatttctcgcttgacaacctcatctttgacgagggcaagctcattggctgcattgacgtcggccgggttggcatcgccgatcgctaccaagatcttgcgatcctctggaattgtctgggcgagttctcccctagcctccagaagcgtctgttccagaaatatgggatcg

SEQ ID NO: 79 - DNA, 4552 bp, synthetic construct
  source 1..4552: mol_type = other DNA
tgcagagccttgcaaatgatgaaagaccaatggaattgatcattgattattgatgatgcatgatgaaagagatagaaacagatgcaagatgggatggcgcgatgatcaaatgataatgaacgttcaacccttcaaaattgaaactctcaggctgagcggctgagcaagctctgagaatgtgggtcttcgaagactttcgcttgagcatggtgcatgtgcaaagagatggaatgtggaattgttgtaggtaggaacacagcccggtagagcggcgcagtggctcagcgaagctgggagaacgactgaaccggtcttgagattcatcatctcagcgtgcgtcagcgcgtcagcttcagcgtttgagaatggcacggactgacctgtcgtacatcccaaggaggcccgtgcgctatactcgccttgtggcctaatctgcgatcaacccatcctcaacgaaagcgcaagtagcgactaagcacactatctttcgggtcggtgcggtcacagtatcggcatctctgtctttagctacgatggtgtgcgtgtaactgatcagtacacccgctgtatcaaaactctatcttcaatccgctaagaatcgtcaccatcagtacatcagtacatcagtgggctaagatctaatggtgtcgttcgacggccgcgggcactagccacgagccaagagcggtacagttgctgcgaaatggtgggcagcctgacaggttcagtttgaataggatgaaaacgccatgaagaacagagaagctggcaattgacgatagtggggcgagcgcacgctgcttgctggtccgagcgtaggacgaacgacaaaccatgggcggggccaccaggccccagggagggcgtcactggttggatgtcgtctgttaggctagagctcaggcgctcagggcctctggcccaagcctcggacgcaagcctctgacgagcgagcgcgcgctggggcgggtctgcgcaggaacggcaggactgccgagttggttgaatattgaatggttggatgattggtttgctgggtttggttttgacacgcacggcacaggacaagtgagtttggaggttggatttgcgcaggtagaaagggcgctcggcctcagggcctcagcgtcagcagacgagctcgccagtccaggtcagtacccagtgttcgttacttcccaccgtccagagtttgctgctgcctctcagcttgattcgtgtcggagaagtagaaatggtcacagcgtaccacacactgtccccatgcctgcgtcctgctccacgagtgtttagccacaaaaatttatggacaaccttactgagcctgtgctggggggtgctttagcaccagcactggcgccatggcgtcaaggttaattccactgtcattcgacaaccttcaactgatgggggcaactgggcacaaaaccttggatatataaccaactccaactcccacggttttttaccttttgctcttctccccaggactcactacttctactcctctattcatcttcaccaaaatgattaataccgtctaccaactggtggcacctcgacgattcgagattaagtattccgacattgatctcaacaataataaggttatcgtccgtcccacctacctctctatctgcaacgcagaccaacgatactaccaaggactccgcgatgccgaaattctgcgtaagaaacttccgatggcgttgatccatgaagccattggagaggtcgtgcgagatccatctggaaactttaaaaccggcgagttggtcgttatggtgccgaacacacctgttgaagaagatgacatcatcgctgagaattatttgcgatcctcgaaatttcgtgcatcgggttttgacggcttcatgcaagaatatgtggaaatcacaccggatcgcctcgttcgtcttccccagaatatcgaccgtactgttgcagcttttacggaaattgtttctgtcagcgtgcatgcaatcggtcgttttgacaagatcgcgcacaaacgacgaaacgttgtcggcatctggggagacggcaacctgggatatattactgcggttttttttaagactatgtttccagagacgaagctgtatatttttggagtcaacccagataaacttcaagattttacgtttgccgacgcgacgtttacggtggagcacattcctgaagacgttaagattgaccatgcttttgagtgcgtgggtggcgcaggctcgggcaaagccattaatcagattatcgactatatcaatcccgaaggtaccatttccattttgggcgtttctgaatacccagtgccaattaacacccgcatggtcctcgagaaaggactgcgcatctttggatcgagccgtagcggtgtcgccgattttgagaagaccgtcgcgctctacaaatccaatcctgagattatcaattatctttcgaatatcgtcggtgcagtcgtcccagtgcgaacgatcgaagatatgaaaaaggcgttcgaaatggacatccaaaaggcttttggtaagacgattatgatgtgggataaataacacggatcaacaaaaatgtgcgccagctttgttgtgtgcccttttcctctagcggatcctatccacatttcgtgaatgaaccgattaagctctgacgagatttccttgttttctgtagatacctcttgtagaggtgtcaaagttatgttgtgatcgagagagttacctgcaaggtattatgcaagcggcttgatgaggacactcaactacgtgtgagtaggagtgcgttgctcagcagttgacgcgtgagccgcttgagcagcttgataaaggtcctaatcgtcttccagctgttggcagacgacaatgtgctgtagtagtaggataggcccgtaaaagtgtagaagcaataggttgagactgactgtaatgggtacttgcgttcaaagactgaaagtccaaaggattgctcaaaggcccctgaggtctgagcctctgagcgcgctcttcgtcaaaattcgccggggccatcggtcatcctctcgagggcagcatcttcctgcttgaagactgagtccgtctcagataacttcgtataatgtatgctatacgaagttatcctgcaggagctcagaccttgcatgttagccttgaccttgcctctatgaccactaattcgcacaagattgcacgttaccattgtcatcttgccatgtatccaatgtttcctgtttgccatagtacgtagtagatacatcgatcatcgatgcagatgacgcagatggcattggttcgctttgccctatgcatgcatcatgcatcatgcatcatgcgtcatgcgtcactatccatattaatcattgccctctgtactaggccatgacacctgcagacccttccccagggatgcttcttgtaatagccaatatactacacaactttaccgattacgatcgagatcgatctcactatagtttgtcgaacttcgatgcacatcgagggtgcggaaaaaagctgacggaagcggaagtgggtgaattggttaatttagttagattggcagggttgttcccaagattcaacgcaagctgagaaagaaaacagaaacacgaggcataaggccagtcagaaaatgcattacgaggggagttgaagtgactgtgggccagtgcctgggtcgtcatgtgcaaattttttcttcggttagactgccgcagcatgcagcaactctgccggccctatataactagtgcttcatcttcttgtcattcttgtctctttaccaacacaccggtactctttcaccatgggtaaggaaaagacacacgtatcgcgaccccgactcaactccaacatggacgcagacctgtacggatacaaatgggctcgagataatgtcggacagtcgggtgcgacgatctacagactctatggaaaaccggacgcccccgagctctttcttaaacacggcaagggtagcgttgcaaacgacgtaaccgacgaaatggtccgtctgaattggctaactgagttcatgccactccccaccatcaagcacttcatccgtacacctgacgatgcgtggctgttgactacggccatccccggtaagaccgcttttcaggtcctcgaggaataccctgactcgggcgagaacatcgtggatgccttggctgtgtttttgcgccgccttcactctattccggtctgcaactgccctttcaacagcgaccgtgtttttaggcttgcccaggcacaatcacgcatgaacaatggtctagtcgacgctagtgatttcgatgacgagcgcaacggctggccggtggaacaagtgtggaaagagatgcataagctcctgcccttttccccagactctgtcgtgacgcatggtgatttctcgcttgacaacctcatctttgacgagggcaagctcattggctgcattgacgtcggccgggttggcatcgccgatcgctaccaagatcttgcgatcctctggaattgtctgggcgagttctcccctagcctccagaagcgtctgttccagaaatatgggatcg

SEQ ID NO: 80 - DNA, 4558 bp, synthetic construct
  source 1..4558: mol_type = other DNA
tgcagagccttgcaaatgatgaaagaccaatggaattgatcattgattattgatgatgcatgatgaaagagatagaaacagatgcaagatgggatggcgcgatgatcaaatgataatgaacgttcaacccttcaaaattgaaactctcaggctgagcggctgagcaagctctgagaatgtgggtcttcgaagactttcgcttgagcatggtgcatgtgcaaagagatggaatgtggaattgttgtaggtaggaacacagcccggtagagcggcgcagtggctcagcgaagctgggagaacgactgaaccggtcttgagattcatcatctcagcgtgcgtcagcgcgtcagcttcagcgtttgagaatggcacggactgacctgtcgtacatcccaaggaggcccgtgcgctatactcgccttgtggcctaatctgcgatcaacccatcctcaacgaaagcgcaagtagcgactaagcacactatctttcgggtcggtgcggtcacagtatcggcatctctgtctttagctacgatggtgtgcgtgtaactgatcagtacacccgctgtatcaaaactctatcttcaatccgctaagaatcgtcaccatcagtacatcagtacatcagtgggctaagatctaatggtgtcgttcgacggccgcgggcactagccacgagccaagagcggtacagttgctgcgaaatggtgggcagcctgacaggttcagtttgaataggatgaaaacgccatgaagaacagagaagctggcaattgacgatagtggggcgagcgcacgctgcttgctggtccgagcgtaggacgaacgacaaaccatgggcggggccaccaggccccagggagggcgtcactggttggatgtcgtctgttaggctagagctcaggcgctcagggcctctggcccaagcctcggacgcaagcctctgacgagcgagcgcgcgctggggcgggtctgcgcaggaacggcaggactgccgagttggttgaatattgaatggttggatgattggtttgctgggtttggttttgacacgcacggcacaggacaagtgagtttggaggttggatttgcgcaggtagaaagggcgctcggcctcagggcctcagcgtcagcagacgagctcgccagtccaggtcagtacccagtgttcgttacttcccaccgtccagagtttgctgctgcctctcagcttgattcgtgtcggagaagtagaaatggtcacagcgtaccacacactgtccccatgcctgcgtcctgctccacgagtgtttagccacaaaaatttatggacaaccttactgagcctgtgctggggggtgctttagcaccagcactggcgccatggcgtcaaggttaattccactgtcattcgacaaccttcaactgatgggggcaactgggcacaaaaccttggatatataaccaactccaactcccacggttttttaccttttgctcttctccccaggactcactacttctactcctctattcatcttcaccaaaatgattaatcaagtctatcgtctcgtctctccacgccaattcgaggtcgcgtataacgatcgcagcctccagtatcacgaggactttgttgtggttcgacctacgcatctgagcatctgcgctgcggatcaacgatattacactggctcgcgtggaaaagaagctatggcaaaaaagcttcccatggctctgatccacgaggccattggtaaagtggtctacgaccccaagggtgagatcaaaaatggcactatggtggtcatgattccgaacacgcctactgaaaaggatgaagtcattggtgagaattatctccgatctagcaaattccgctcgtccggatatgatggattcatgcaagattacgtcttcatgggtcgcgaccgtattgtggaactcccggaaggaattgacccgtatgttgttgcttttaccgagttgatgaccatcacaacccatgtgttgagccgatttgaatctcgttcccataaacgacgtaacgtttttggcgtttggggagacggcaaccttggtttcatcacgacactcttcctgaagaagatgtataaagattgtaaagttatcatcttcggaaaaactggatataaactcgacaatttctctttcgttgatgaggtgtatacgattgacgaaatccctgaggacctgcgcatcgaccatgcctttgagtgcgttggaggtaagggttctcagtatgcaatcgaccaaatgattgaccatctccaccctgaaggttccattgctcttatgggtgttagcgaatttccagttgaagttaatactcgtatgatcctggaaaaaggaatcacactgatcggaagctctcgatccggtcgagaggacttcgtgcgcacggtcaactttctgaaggaaaatcccgatgttgttgaatacctgggtacccttgtgggcgaggtccaagaagtcaagacgatctccgatattttgtctgcatttgagaaagaccttacatcctcttggggtaaaaccgtcatggagtggaagatctaacacggatcaacaaaaatgtgcgccagctttgttgtgtgcccttttcctctagcggatcctatccacatttcgtgaatgaaccgattaagctctgacgagatttccttgttttctgtagatacctcttgtagaggtgtcaaagttatgttgtgatcgagagagttacctgcaaggtattatgcaagcggcttgatgaggacactcaactacgtgtgagtaggagtgcgttgctcagcagttgacgcgtgagccgcttgagcagcttgataaaggtcctaatcgtcttccagctgttggcagacgacaatgtgctgtagtagtaggataggcccgtaaaagtgtagaagcaataggttgagactgactgtaatgggtacttgcgttcaaagactgaaagtccaaaggattgctcaaaggcccctgaggtctgagcctctgagcgcgctcttcgtcaaaattcgccggggccatcggtcatcctctcgagggcagcatcttcctgcttgaagactgagtccgtctcagataacttcgtataatgtatgctatacgaagttatcctgcaggagctcagaccttgcatgttagccttgaccttgcctctatgaccactaattcgcacaagattgcacgttaccattgtcatcttgccatgtatccaatgtttcctgtttgccatagtacgtagtagatacatcgatcatcgatgcagatgacgcagatggcattggttcgctttgccctatgcatgcatcatgcatcatgcatcatgcgtcatgcgtcactatccatattaatcattgccctctgtactaggccatgacacctgcagacccttccccagggatgcttcttgtaatagccaatatactacacaactttaccgattacgatcgagatcgatctcactatagtttgtcgaacttcgatgcacatcgagggtgcggaaaaaagctgacggaagcggaagtgggtgaattggttaatttagttagattggcagggttgttcccaagattcaacgcaagctgagaaagaaaacagaaacacgaggcataaggccagtcagaaaatgcattacgaggggagttgaagtgactgtgggccagtgcctgggtcgtcatgtgcaaattttttcttcggttagactgccgcagcatgcagcaactctgccggccctatataactagtgcttcatcttcttgtcattcttgtctctttaccaacacaccggtactctttcaccatgggtaaggaaaagacacacgtatcgcgaccccgactcaactccaacatggacgcagacctgtacggatacaaatgggctcgagataatgtcggacagtcgggtgcgacgatctacagactctatggaaaaccggacgcccccgagctctttcttaaacacggcaagggtagcgttgcaaacgacgtaaccgacgaaatggtccgtctgaattggctaactgagttcatgccactccccaccatcaagcacttcatccgtacacctgacgatgcgtggctgttgactacggccatccccggtaagaccgcttttcaggtcctcgaggaataccctgactcgggcgagaacatcgtggatgccttggctgtgtttttgcgccgccttcactctattccggtctgcaactgccctttcaacagcgaccgtgtttttaggcttgcccaggcacaatcacgcatgaacaatggtctagtcgacgctagtgatttcgatgacgagcgcaacggctggccggtggaacaagtgtggaaagagatgcataagctcctgcccttttccccagactctgtcgtgacgcatggtgatttctcgcttgacaacctcatctttgacgagggcaagctcattggctgcattgacgtcggccgggttggcatcgccgatcgctaccaagatcttgcgatcctctggaattgtctgggcgagttctcccctagcctccagaagcgtctgttccagaaatatgggatcg

SEQ ID NO: 81 - DNA, 4552 bp, synthetic construct
  source 1..4552: mol_type = other DNA
tgcagagccttgcaaatgatgaaagaccaatggaattgatcattgattattgatgatgcatgatgaaagagatagaaacagatgcaagatgggatggcgcgatgatcaaatgataatgaacgttcaacccttcaaaattgaaactctcaggctgagcggctgagcaagctctgagaatgtgggtcttcgaagactttcgcttgagcatggtgcatgtgcaaagagatggaatgtggaattgttgtaggtaggaacacagcccggtagagcggcgcagtggctcagcgaagctgggagaacgactgaaccggtcttgagattcatcatctcagcgtgcgtcagcgcgtcagcttcagcgtttgagaatggcacggactgacctgtcgtacatcccaaggaggcccgtgcgctatactcgccttgtggcctaatctgcgatcaacccatcctcaacgaaagcgcaagtagcgactaagcacactatctttcgggtcggtgcggtcacagtatcggcatctctgtctttagctacgatggtgtgcgtgtaactgatcagtacacccgctgtatcaaaactctatcttcaatccgctaagaatcgtcaccatcagtacatcagtacatcagtgggctaagatctaatggtgtcgttcgacggccgcgggcactagccacgagccaagagcggtacagttgctgcgaaatggtgggcagcctgacaggttcagtttgaataggatgaaaacgccatgaagaacagagaagctggcaattgacgatagtggggcgagcgcacgctgcttgctggtccgagcgtaggacgaacgacaaaccatgggcggggccaccaggccccagggagggcgtcactggttggatgtcgtctgttaggctagagctcaggcgctcagggcctctggcccaagcctcggacgcaagcctctgacgagcgagcgcgcgctggggcgggtctgcgcaggaacggcaggactgccgagttggttgaatattgaatggttggatgattggtttgctgggtttggttttgacacgcacggcacaggacaagtgagtttggaggttggatttgcgcaggtagaaagggcgctcggcctcagggcctcagcgtcagcagacgagctcgccagtccaggtcagtacccagtgttcgttacttcccaccgtccagagtttgctgctgcctctcagcttgattcgtgtcggagaagtagaaatggtcacagcgtaccacacactgtccccatgcctgcgtcctgctccacgagtgtttagccacaaaaatttatggacaaccttactgagcctgtgctggggggtgctttagcaccagcactggcgccatggcgtcaaggttaattccactgtcattcgacaaccttcaactgatgggggcaactgggcacaaaaccttggatatataaccaactccaactcccacggttttttaccttttgctcttctccccaggactcactacttctactcctctattcatcttcaccaaaatgctcaaccaagtgtatcgcctggtcgatccacgtcagattgaagttcaaactgttgcagaagagatcactgataatgacatcgtcgtccgccccaaatatctgtcggtctgtcatgcagacacgcgatactttacaggtcaacgtccccaagcaaccttgcgccagaagctcccaatggctttgatccatgaaggagttggcgaggttgttaaggaccctcaaaataaatttaagcccggtacgttggtcgctatggtccccaatacgccctttgaaaccgaccctatcattaaagaaaactacttgccaacgtctaaatttcgcagcagcggttacgatggtttcatgcaggaatacgttacacttcatcgtgatcgcgcgatcgtcgtgccagacaacttcgaccaccaaatgagcgcattcattgagatggtttccgtcggagtccacgccctcacccagctggaggccgtgatggatgcggatcgcaagatcatcggaatttggggagatggcaacttgggttttatcacagcaaccctcgtcaagcaaatctttccagactctcaactgatgatctttggacgacatcgctccaaattggactatttcagctttgcggacaagacatacctggtggacgacattcctagcgatcttcaagtttctcaggctctggaatgcaccggaggccgaggctcggagtctgctattgctcaaattatccaacacattcgaccaatgggcaccgctatccttatgggagtttccgaagatcccgttggtatcgatacacgcagcgtgttggcagagggattgacccttcgcggcgtgagccgtagcggtcgcgcggattttcagcgcgccatcgacattttgacgaaatcccccgtcacacgtgaacgtctgcaaaatcttgtgggtttcactcgaaaggtcagcacaatccaggatatcaccgatttcttcgagggtgcattgacaaactactggggcaaggccgttatggagtgggatgtttaacacggatcaacaaaaatgtgcgccagctttgttgtgtgcccttttcctctagcggatcctatccacatttcgtgaatgaaccgattaagctctgacgagatttccttgttttctgtagatacctcttgtagaggtgtcaaagttatgttgtgatcgagagagttacctgcaaggtattatgcaagcggcttgatgaggacactcaactacgtgtgagtaggagtgcgttgctcagcagttgacgcgtgagccgcttgagcagcttgataaaggtcctaatcgtcttccagctgttggcagacgacaatgtgctgtagtagtaggataggcccgtaaaagtgtagaagcaataggttgagactgactgtaatgggtacttgcgttcaaagactgaaagtccaaaggattgctcaaaggcccctgaggtctgagcctctgagcgcgctcttcgtcaaaattcgccggggccatcggtcatcctctcgagggcagcatcttcctgcttgaagactgagtccgtctcagataacttcgtataatgtatgctatacgaagttatcctgcaggagctcagaccttgcatgttagccttgaccttgcctctatgaccactaattcgcacaagattgcacgttaccattgtcatcttgccatgtatccaatgtttcctgtttgccatagtacgtagtagatacatcgatcatcgatgcagatgacgcagatggcattggttcgctttgccctatgcatgcatcatgcatcatgcatcatgcgtcatgcgtcactatccatattaatcattgccctctgtactaggccatgacacctgcagacccttccccagggatgcttcttgtaatagccaatatactacacaactttaccgattacgatcgagatcgatctcactatagtttgtcgaacttcgatgcacatcgagggtgcggaaaaaagctgacggaagcggaagtgggtgaattggttaatttagttagattggcagggttgttcccaagattcaacgcaagctgagaaagaaaacagaaacacgaggcataaggccagtcagaaaatgcattacgaggggagttgaagtgactgtgggccagtgcctgggtcgtcatgtgcaaattttttcttcggttagactgccgcagcatgcagcaactctgccggccctatataactagtgcttcatcttcttgtcattcttgtctctttaccaacacaccggtactctttcaccatgggtaaggaaaagacacacgtatcgcgaccccgactcaactccaacatggacgcagacctgtacggatacaaatgggctcgagataatgtcggacagtcgggtgcgacgatctacagactctatggaaaaccggacgcccccgagctctttcttaaacacggcaagggtagcgttgcaaacgacgtaaccgacgaaatggtccgtctgaattggctaactgagttcatgccactccccaccatcaagcacttcatccgtacacctgacgatgcgtggctgttgactacggccatccccggtaagaccgcttttcaggtcctcgaggaataccctgactcgggcgagaacatcgtggatgccttggctgtgtttttgcgccgccttcactctattccggtctgcaactgccctttcaacagcgaccgtgtttttaggcttgcccaggcacaatcacgcatgaacaatggtctagtcgacgctagtgatttcgatgacgagcgcaacggctggccggtggaacaagtgtggaaagagatgcataagctcctgcccttttccccagactctgtcgtgacgcatggtgatttctcgcttgacaacctcatctttgacgagggcaagctcattggctgcattgacgtcggccgggttggcatcgccgatcgctaccaagatcttgcgatcctctggaattgtctgggcgagttctcccctagcctccagaagcgtctgttccagaaatatgggatcg

SEQ ID NO: 82 - DNA, 4594 bp, synthetic construct
  source 1..4594: mol_type = other DNA
tgcagagccttgcaaatgatgaaagaccaatggaattgatcattgattattgatgatgcatgatgaaagagatagaaacagatgcaagatgggatggcgcgatgatcaaatgataatgaacgttcaacccttcaaaattgaaactctcaggctgagcggctgagcaagctctgagaatgtgggtcttcgaagactttcgcttgagcatggtgcatgtgcaaagagatggaatgtggaattgttgtaggtaggaacacagcccggtagagcggcgcagtggctcagcgaagctgggagaacgactgaaccggtcttgagattcatcatctcagcgtgcgtcagcgcgtcagcttcagcgtttgagaatggcacggactgacctgtcgtacatcccaaggaggcccgtgcgctatactcgccttgtggcctaatctgcgatcaacccatcctcaacgaaagcgcaagtagcgactaagcacactatctttcgggtcggtgcggtcacagtatcggcatctctgtctttagctacgatggtgtgcgtgtaactgatcagtacacccgctgtatcaaaactctatcttcaatccgctaagaatcgtcaccatcagtacatcagtacatcagtgggctaagatctaatggtgtcgttcgacggccgcgggcactagccacgagccaagagcggtacagttgctgcgaaatggtgggcagcctgacaggttcagtttgaataggatgaaaacgccatgaagaacagagaagctggcaattgacgatagtggggcgagcgcacgctgcttgctggtccgagcgtaggacgaacgacaaaccatgggcggggccaccaggccccagggagggcgtcactggttggatgtcgtctgttaggctagagctcaggcgctcagggcctctggcccaagcctcggacgcaagcctctgacgagcgagcgcgcgctggggcgggtctgcgcaggaacggcaggactgccgagttggttgaatattgaatggttggatgattggtttgctgggtttggttttgacacgcacggcacaggacaagtgagtttggaggttggatttgcgcaggtagaaagggcgctcggcctcagggcctcagcgtcagcagacgagctcgccagtccaggtcagtacccagtgttcgttacttcccaccgtccagagtttgctgctgcctctcagcttgattcgtgtcggagaagtagaaatggtcacagcgtaccacacactgtccccatgcctgcgtcctgctccacgagtgtttagccacaaaaatttatggacaaccttactgagcctgtgctggggggtgctttagcaccagcactggcgccatggcgtcaaggttaattccactgtcattcgacaaccttcaactgatgggggcaactgggcacaaaaccttggatatataaccaactccaactcccacggttttttaccttttgctcttctccccaggactcactacttctactcctctattcatcttcaccaaaatgtgagacctaatatcactgctgtacagacaagactgtgtatattaggtctcaatgatcaattacgtgtatcagctggtcagcccccacgtcttttccctcaaatatgaagaagtggacttcaagaaagaggtcatcatccgtccgaagtgtatggctgtgtgccacgcagaccagcgatattttctgggacgccgcgacgctaagatcctgcgacaaaaattgcctatggcccttatccacgaatgttgcggtcaggtggtctgggatggcacaggttccttccaacgaggccaaaaggtcgttctcattccaaatgtgccaggacgcgacgacggtgtcacatacgaaaactacgctgaaggatctcgttttcttagctcgggctgcgacggtttcatgcgcgagtatgtcaacctttccccagatcgtgtggttcccttcgaacaggttccgcttccggtggccgcgatcacagagttcgtgtccgtggcggttcacgcggccggtcgctttatgcgagcggcgcacacacgccgcgaggctatcggagtgtggggagatggctctctggcttatgtcgtctgctgcgttcttcgtcgactgctcccggagtcgcgtatttttgtggtgggtaagcatgaacgcaagttgctccagttctcgtttgccgatcgcaccttcctttttgatagcctcccggaggacttccatattgaccacgcgttcgaatgcactggaggagagggctcttactatgctatcgatgatattattaccgcggtgcgtccccaaggcgctgttatgcttatgggtgtctctgaaaaccgcgttccagttcgcacccgtgacattctggaaaaaggcttgacgttcaccggttgttctcgttctggacgcgaagactttgttaaggcagtcgagcttatggagcaaccccaattccaaaaacgccttagcgcaattatttacgaggatcgtccggtccatactgtcgccgatctgtcccgtgttttcgagacggatttgaatacgccgttcaagacagttttccgttgggagatttaacacggatcaacaaaaatgtgcgccagctttgttgtgtgcccttttcctctagcggatcctatccacatttcgtgaatgaaccgattaagctctgacgagatttccttgttttctgtagatacctcttgtagaggtgtcaaagttatgttgtgatcgagagagttacctgcaaggtattatgcaagcggcttgatgaggacactcaactacgtgtgagtaggagtgcgttgctcagcagttgacgcgtgagccgcttgagcagcttgataaaggtcctaatcgtcttccagctgttggcagacgacaatgtgctgtagtagtaggataggcccgtaaaagtgtagaagcaataggttgagactgactgtaatgggtacttgcgttcaaagactgaaagtccaaaggattgctcaaaggcccctgaggtctgagcctctgagcgcgctcttcgtcaaaattcgccggggccatcggtcatcctctcgagggcagcatcttcctgcttgaagactgagtccgtctcagataacttcgtataatgtatgctatacgaagttatcctgcaggagctcagaccttgcatgttagccttgaccttgcctctatgaccactaattcgcacaagattgcacgttaccattgtcatcttgccatgtatccaatgtttcctgtttgccatagtacgtagtagatacatcgatcatcgatgcagatgacgcagatggcattggttcgctttgccctatgcatgcatcatgcatcatgcatcatgcgtcatgcgtcactatccatattaatcattgccctctgtactaggccatgacacctgcagacccttccccagggatgcttcttgtaatagccaatatactacacaactttaccgattacgatcgagatcgatctcactatagtttgtcgaacttcgatgcacatcgagggtgcggaaaaaagctgacggaagcggaagtgggtgaattggttaatttagttagattggcagggttgttcccaagattcaacgcaagctgagaaagaaaacagaaacacgaggcataaggccagtcagaaaatgcattacgaggggagttgaagtgactgtgggccagtgcctgggtcgtcatgtgcaaattttttcttcggttagactgccgcagcatgcagcaactctgccggccctatataactagtgcttcatcttcttgtcattcttgtctctttaccaacacaccggtactctttcaccatgggtaaggaaaagacacacgtatcgcgaccccgactcaactccaacatggacgcagacctgtacggatacaaatgggctcgagataatgtcggacagtcgggtgcgacgatctacagactctatggaaaaccggacgcccccgagctctttcttaaacacggcaagggtagcgttgcaaacgacgtaaccgacgaaatggtccgtctgaattggctaactgagttcatgccactccccaccatcaagcacttcatccgtacacctgacgatgcgtggctgttgactacggccatccccggtaagaccgcttttcaggtcctcgaggaataccctgactcgggcgagaacatcgtggatgccttggctgtgtttttgcgccgccttcactctattccggtctgcaactgccctttcaacagcgaccgtgtttttaggcttgcccaggcacaatcacgcatgaacaatggtctagtcgacgctagtgatttcgatgacgagcgcaacggctggccggtggaacaagtgtggaaagagatgcataagctcctgcccttttccccagactctgtcgtgacgcatggtgatttctcgcttgacaacctcatctttgacgagggcaagctcattggctgcattgacgtcggccgggttggcatcgccgatcgctaccaagatcttgcgatcctctggaattgtctgggcgagttctcccctagcctccagaagcgtctgttccagaaatatgggatcg

SEQ ID NO: 83 - DNA, 4606 bp, synthetic construct
  source 1..4606: mol_type = other DNA
tgcagagccttgcaaatgatgaaagaccaatggaattgatcattgattattgatgatgcatgatgaaagagatagaaacagatgcaagatgggatggcgcgatgatcaaatgataatgaacgttcaacccttcaaaattgaaactctcaggctgagcggctgagcaagctctgagaatgtgggtcttcgaagactttcgcttgagcatggtgcatgtgcaaagagatggaatgtggaattgttgtaggtaggaacacagcccggtagagcggcgcagtggctcagcgaagctgggagaacgactgaaccggtcttgagattcatcatctcagcgtgcgtcagcgcgtcagcttcagcgtttgagaatggcacggactgacctgtcgtacatcccaaggaggcccgtgcgctatactcgccttgtggcctaatctgcgatcaacccatcctcaacgaaagcgcaagtagcgactaagcacactatctttcgggtcggtgcggtcacagtatcggcatctctgtctttagctacgatggtgtgcgtgtaactgatcagtacacccgctgtatcaaaactctatcttcaatccgctaagaatcgtcaccatcagtacatcagtacatcagtgggctaagatctaatggtgtcgttcgacggccgcgggcactagccacgagccaagagcggtacagttgctgcgaaatggtgggcagcctgacaggttcagtttgaataggatgaaaacgccatgaagaacagagaagctggcaattgacgatagtggggcgagcgcacgctgcttgctggtccgagcgtaggacgaacgacaaaccatgggcggggccaccaggccccagggagggcgtcactggttggatgtcgtctgttaggctagagctcaggcgctcagggcctctggcccaagcctcggacgcaagcctctgacgagcgagcgcgcgctggggcgggtctgcgcaggaacggcaggactgccgagttggttgaatattgaatggttggatgattggtttgctgggtttggttttgacacgcacggcacaggacaagtgagtttggaggttggatttgcgcaggtagaaagggcgctcggcctcagggcctcagcgtcagcagacgagctcgccagtccaggtcagtacccagtgttcgttacttcccaccgtccagagtttgctgctgcctctcagcttgattcgtgtcggagaagtagaaatggtcacagcgtaccacacactgtccccatgcctgcgtcctgctccacgagtgtttagccacaaaaatttatggacaaccttactgagcctgtgctggggggtgctttagcaccagcactggcgccatggcgtcaaggttaattccactgtcattcgacaaccttcaactgatgggggcaactgggcacaaaaccttggatatataaccaactccaactcccacggttttttaccttttgctcttctccccaggactcactacttctactcctctattcatcttcaccaaaatgtgagacctaatatcactgctgtacagacaagactgtgtatattaggtctcaatgcttaaccaagtttatcgactcgtttctccccgtcagttcgaggtggagacagtcgcagaagaagttgatgcggatgacttgatcgtgcgtcccaagtttctcagcatttgccacgcggacactcgatacttttttggacagcgctcgcaagccgcactccgagccaaacttccgatggctttgattcacgaggccgtcggtgaagtcgtttacgatccccgtaatgaatacaagcccggaaccttggtcgcaatggtgcctaacaccccggtcaagaaggatagcatcattcaagaaaattacctgcccagctcccgtttccgatctagcggttatgatggcttcatgcaagaatacgtgtgtctgcgacgtgatcgagctattactgttccttccgactttgacccgcatatggcggcgttcattgagatggtttccgttggagtgcaggcacttactaagttggaatccacaatggatgaggatcaacgcgttattggcatttggggtgacggaaatctcggttacatcaccgccaccctcgttaagcaaatctttccagactctcagctcctcgtcttcggacgccatcagtctaaactggattatttctcgtttgcagataagacgtatctggtggacgatatcccggccgacgtcaaagtttcgcaggccctcgaatgtacgggcggtcagggctccgaagccgcgatccaacagatcatccaacacattcaaccgatgggtacggcaattctcatgggtgtttctgagaatcccgtcggaatcgacactcgttcggttcttgctgaaggtctgactctccgaggagtgtcccgtagctcgcgcgaggattttaagcgtgcggttgacatcctgtcctcttcgccagttacgcgtgaacgattgcagaatctcgtcggctatgttcagaaggttagctccatccaagacattaccaacttctttgatagcgccctcactaattactggggcaaggaggtgatggagtgggacgtgtaacacggatcaacaaaaatgtgcgccagctttgttgtgtgcccttttcctctagcggatcctatccacatttcgtgaatgaaccgattaagctctgacgagatttccttgttttctgtagatacctcttgtagaggtgtcaaagttatgttgtgatcgagagagttacctgcaaggtattatgcaagcggcttgatgaggacactcaactacgtgtgagtaggagtgcgttgctcagcagttgacgcgtgagccgcttgagcagcttgataaaggtcctaatcgtcttccagctgttggcagacgacaatgtgctgtagtagtaggataggcccgtaaaagtgtagaagcaataggttgagactgactgtaatgggtacttgcgttcaaagactgaaagtccaaaggattgctcaaaggcccctgaggtctgagcctctgagcgcgctcttcgtcaaaattcgccggggccatcggtcatcctctcgagggcagcatcttcctgcttgaagactgagtccgtctcagataacttcgtataatgtatgctatacgaagttatcctgcaggagctcagaccttgcatgttagccttgaccttgcctctatgaccactaattcgcacaagattgcacgttaccattgtcatcttgccatgtatccaatgtttcctgtttgccatagtacgtagtagatacatcgatcatcgatgcagatgacgcagatggcattggttcgctttgccctatgcatgcatcatgcatcatgcatcatgcgtcatgcgtcactatccatattaatcattgccctctgtactaggccatgacacctgcagacccttccccagggatgcttcttgtaatagccaatatactacacaactttaccgattacgatcgagatcgatctcactatagtttgtcgaacttcgatgcacatcgagggtgcggaaaaaagctgacggaagcggaagtgggtgaattggttaatttagttagattggcagggttgttcccaagattcaacgcaagctgagaaagaaaacagaaacacgaggcataaggccagtcagaaaatgcattacgaggggagttgaagtgactgtgggccagtgcctgggtcgtcatgtgcaaattttttcttcggttagactgccgcagcatgcagcaactctgccggccctatataactagtgcttcatcttcttgtcattcttgtctctttaccaacacaccggtactctttcaccatgggtaaggaaaagacacacgtatcgcgaccccgactcaactccaacatggacgcagacctgtacggatacaaatgggctcgagataatgtcggacagtcgggtgcgacgatctacagactctatggaaaaccggacgcccccgagctctttcttaaacacggcaagggtagcgttgcaaacgacgtaaccgacgaaatggtccgtctgaattggctaactgagttcatgccactccccaccatcaagcacttcatccgtacacctgacgatgcgtggctgttgactacggccatccccggtaagaccgcttttcaggtcctcgaggaataccctgactcgggcgagaacatcgtggatgccttggctgtgtttttgcgccgccttcactctattccggtctgcaactgccctttcaacagcgaccgtgtttttaggcttgcccaggcacaatcacgcatgaacaatggtctagtcgacgctagtgatttcgatgacgagcgcaacggctggccggtggaacaagtgtggaaagagatgcataagctcctgcccttttccccagactctgtcgtgacgcatggtgatttctcgcttgacaacctcatctttgacgagggcaagctcattggctgcattgacgtcggccgggttggcatcgccgatcgctaccaagatcttgcgatcctctggaattgtctgggcgagttctcccctagcctccagaagcgtctgttccagaaatatgggatcg

SEQ ID NO: 84 - DNA, 4555 bp, synthetic construct
  source 1..4555: mol_type = other DNA
tgcagagccttgcaaatgatgaaagaccaatggaattgatcattgattattgatgatgcatgatgaaagagatagaaacagatgcaagatgggatggcgcgatgatcaaatgataatgaacgttcaacccttcaaaattgaaactctcaggctgagcggctgagcaagctctgagaatgtgggtcttcgaagactttcgcttgagcatggtgcatgtgcaaagagatggaatgtggaattgttgtaggtaggaacacagcccggtagagcggcgcagtggctcagcgaagctgggagaacgactgaaccggtcttgagattcatcatctcagcgtgcgtcagcgcgtcagcttcagcgtttgagaatggcacggactgacctgtcgtacatcccaaggaggcccgtgcgctatactcgccttgtggcctaatctgcgatcaacccatcctcaacgaaagcgcaagtagcgactaagcacactatctttcgggtcggtgcggtcacagtatcggcatctctgtctttagctacgatggtgtgcgtgtaactgatcagtacacccgctgtatcaaaactctatcttcaatccgctaagaatcgtcaccatcagtacatcagtacatcagtgggctaagatctaatggtgtcgttcgacggccgcgggcactagccacgagccaagagcggtacagttgctgcgaaatggtgggcagcctgacaggttcagtttgaataggatgaaaacgccatgaagaacagagaagctggcaattgacgatagtggggcgagcgcacgctgcttgctggtccgagcgtaggacgaacgacaaaccatgggcggggccaccaggccccagggagggcgtcactggttggatgtcgtctgttaggctagagctcaggcgctcagggcctctggcccaagcctcggacgcaagcctctgacgagcgagcgcgcgctggggcgggtctgcgcaggaacggcaggactgccgagttggttgaatattgaatggttggatgattggtttgctgggtttggttttgacacgcacggcacaggacaagtgagtttggaggttggatttgcgcaggtagaaagggcgctcggcctcagggcctcagcgtcagcagacgagctcgccagtccaggtcagtacccagtgttcgttacttcccaccgtccagagtttgctgctgcctctcagcttgattcgtgtcggagaagtagaaatggtcacagcgtaccacacactgtccccatgcctgcgtcctgctccacgagtgtttagccacaaaaatttatggacaaccttactgagcctgtgctggggggtgctttagcaccagcactggcgccatggcgtcaaggttaattccactgtcattcgacaaccttcaactgatgggggcaactgggcacaaaaccttggatatataaccaactccaactcccacggttttttaccttttgctcttctccccaggactcactacttctactcctctattcatcttcaccaaaatgattaatacactgtacaaacttacggccccactgattgtggaatccttttatgaaaatatcgactgtcattccgacaatattattgtgcgccccgaaaaactttctatctgcaaggctgacatccgatactacttcggaatgcgtaatgctaaagtgcttaaagagaagttgcccctcgcactcattcatgaggcatgtggctctgttgtctatgacatcaccggcaagtttaaggctggtgaccaggtcgttatgcttcctaatattccgggtattaacatgcagtatcatgagaattatcgtcgtgatagccttttccgcagctctggagcagacggattcatgcaggagttggtgtcgatccctcagtcgcaagtcatcaaatttgagaagatggatcaaaacattgccgcgttcacggagttcatctctgtcgctattcatgcagtcagctcgtatcttgatcgcagcgcgggaaagcgaaatggtatcaagcgtaaaatcggtgtgtggggtagcggcgcaatgggctacgcggtgtcgtgtgtcttgaagtacttcattccatctgcagagatcactgtcattggaggtagcaaagcaaagctggacatgttttcctttgtcaatcatacttgttccctgagcgagcttcctgacgatgcagagttcgatgattgcttcgaatgtgtcggtggagcccaatctggcaatgcaatcaatcaaattatcgatcatattctgccggaaggcctcctgctgttgttgggcgttagcgaagaggccgtgcctgtcaacactcgaatggtgctcgaaaaaggcatcactttgttgggtcgatcgcgctctgagcgttcggactttatcaaaacaatcgacatccttgatacgaacgagaatattcgacgccgcatttctaacttgatctctggcgaggtggagattaacgaggtgaacgacatccacaaggcttttaatcagtccaaaattgcagactataaaatcatcttgaattggcgtatttaacacggatcaacaaaaatgtgcgccagctttgttgtgtgcccttttcctctagcggatcctatccacatttcgtgaatgaaccgattaagctctgacgagatttccttgttttctgtagatacctcttgtagaggtgtcaaagttatgttgtgatcgagagagttacctgcaaggtattatgcaagcggcttgatgaggacactcaactacgtgtgagtaggagtgcgttgctcagcagttgacgcgtgagccgcttgagcagcttgataaaggtcctaatcgtcttccagctgttggcagacgacaatgtgctgtagtagtaggataggcccgtaaaagtgtagaagcaataggttgagactgactgtaatgggtacttgcgttcaaagactgaaagtccaaaggattgctcaaaggcccctgaggtctgagcctctgagcgcgctcttcgtcaaaattcgccggggccatcggtcatcctctcgagggcagcatcttcctgcttgaagactgagtccgtctcagataacttcgtataatgtatgctatacgaagttatcctgcaggagctcagaccttgcatgttagccttgaccttgcctctatgaccactaattcgcacaagattgcacgttaccattgtcatcttgccatgtatccaatgtttcctgtttgccatagtacgtagtagatacatcgatcatcgatgcagatgacgcagatggcattggttcgctttgccctatgcatgcatcatgcatcatgcatcatgcgtcatgcgtcactatccatattaatcattgccctctgtactaggccatgacacctgcagacccttccccagggatgcttcttgtaatagccaatatactacacaactttaccgattacgatcgagatcgatctcactatagtttgtcgaacttcgatgcacatcgagggtgcggaaaaaagctgacggaagcggaagtgggtgaattggttaatttagttagattggcagggttgttcccaagattcaacgcaagctgagaaagaaaacagaaacacgaggcataaggccagtcagaaaatgcattacgaggggagttgaagtgactgtgggccagtgcctgggtcgtcatgtgcaaattttttcttcggttagactgccgcagcatgcagcaactctgccggccctatataactagtgcttcatcttcttgtcattcttgtctctttaccaacacaccggtactctttcaccatgggtaaggaaaagacacacgtatcgcgaccccgactcaactccaacatggacgcagacctgtacggatacaaatgggctcgagataatgtcggacagtcgggtgcgacgatctacagactctatggaaaaccggacgcccccgagctctttcttaaacacggcaagggtagcgttgcaaacgacgtaaccgacgaaatggtccgtctgaattggctaactgagttcatgccactccccaccatcaagcacttcatccgtacacctgacgatgcgtggctgttgactacggccatccccggtaagaccgcttttcaggtcctcgaggaataccctgactcgggcgagaacatcgtggatgccttggctgtgtttttgcgccgccttcactctattccggtctgcaactgccctttcaacagcgaccgtgtttttaggcttgcccaggcacaatcacgcatgaacaatggtctagtcgacgctagtgatttcgatgacgagcgcaacggctggccggtggaacaagtgtggaaagagatgcataagctcctgcccttttccccagactctgtcgtgacgcatggtgatttctcgcttgacaacctcatctttgacgagggcaagctcattggctgcattgacgtcggccgggttggcatcgccgatcgctaccaagatcttgcgatcctctggaattgtctgggcgagttctcccctagcctccagaagcgtctgttccagaaatatgggatcg

SEQ ID NO: 85 - DNA, 500 bp, Moniliella pollinis
  source 1..500: mol_type = genomic DNA
tgcagagccttgcaaatgatgaaagaccaatggaattgatcattgattattgatgatgcatgatgaaagagatagaaacagatgcaagatgggatggcgcgatgatcaaatgataatgaacgttcaacccttcaaaattgaaactctcaggctgagcggctgagcaagctctgagaatgtgggtcttcgaagactttcgcttgagcatggtgcatgtgcaaagagatggaatgtggaattgttgtaggtaggaacacagcccggtagagcggcgcagtggctcagcgaagctgggagaacgactgaaccggtcttgagattcatcatctcagcgtgcgtcagcgcgtcagcttcagcgtttgagaatggcacggactgacctgtcgtacatcccaaggaggcccgtgcgctatactcgccttgtggcctaatctgcgatcaacccatcctcaacgaaagcgcaagtagcgactaagcacactatctttcgggtcggtgcg

SEQ ID NO: 86 - DNA, 1002 bp, Moniliella pollinis
  source 1..1002: mol_type = other DNA
tttagctacgatggtgtgcgtgtaactgatcagtacacccgctgtatcaaaactctatcttcaatccgctaagaatcgtcaccatcagtacatcagtacatcagtgggctaagatctaatggtgtcgttcgacggccgcgggcactagccacgagccaagagcggtacagttgctgcgaaatggtgggcagcctgacaggttcagtttgaataggatgaaaacgccatgaagaacagagaagctggcaattgacgatagtggggcgagcgcacgctgcttgctggtccgagcgtaggacgaacgacaaaccatgggcggggccaccaggccccagggagggcgtcactggttggatgtcgtctgttaggctagagctcaggcgctcagggcctctggcccaagcctcggacgcaagcctctgacgagcgagcgcgcgctggggcgggtctgcgcaggaacggcaggactgccgagttggttgaatattgaatggttggatgattggtttgctgggtttggttttgacacgcacggcacaggacaagtgagtttggaggttggatttgcgcaggtagaaagggcgctcggcctcagggcctcagcgtcagcagacgagctcgccagtccaggtcagtacccagtgttcgttacttcccaccgtccagagtttgctgctgcctctcagcttgattcgtgtcggagaagtagaaatggtcacagcgtaccacacactgtccccatgcctgcgtcctgctccacgagtgtttagccacaaaaatttatggacaaccttactgagcctgtgctggggggtgctttagcaccagcactggcgccatggcgtcaaggttaattccactgtcattcgacaaccttcaactgatgggggcaactgggcacaaaaccttggatatataaccaactccaactcccacggttttttaccttttgctcttctccccaggactcactacttctactcctctattcatcttcaccaa

SEQ ID NO: 87 - DNA, 1038 bp, synthetic construct
  source 1..1038: mol_type = other DNA
atgaaagccctcgttttggacgaatacaatcaattgaattaccgtgatttccccgagcccgaaatccactccggagaggtgctgatcgagatcaaggcgtgcggtatttgtggctctgatgtgcacggtatggacggatcgaccggacgtcgaaaaccaccgctggttatgggtcacgaagcctctggcgtcattatcgaaaccggtagcgatgttaagaactggaaaacaggtgaccgagtcacgtttgatagcaccgtgtacccacttaatgactggttcactctgaaaggccactacaacctcagcaacaatcgacaagtgttgggagtgtctcctggcgagtatcgccgtcatggtgcgtttgccgaacgacttgcggttccgcaacatatcctgcaccgaatcccagagaacgttagcttcgtggaggctgcgatggttgagcccatcgctgtggcagctcacgcggtgaatgtttctggattgaagccgggcaattcggctatggttgcgggcgcgggcatggtcggagtgtttgttgtccaactgctgaagctttttggagctaaccctgttgtggttattgacatcgatcacaagaaactgaagcttgctcacgaattcggtgctgactttacattcaatcctaaagaaaaggatattgacgaacgaatcttgcaactcacaaaatcgcgcggttttgaccttacatttgaagtcgtcggcatcaccgagacggtccagacctgcattaccaacacacgtaagggtggcacggtggttcttgttggaaacttgtcccccgaaatccaatttcccctgcaaaaagtcgttacttctgaaatcactgtgcagggctcttgtgccatcaagggtgaatacgagctggcactggacctcttggccgcaaagaaggttgacgtctcgaaactcgtttcggctgttgcaccgctgtctgagggagcggaatggtttaagcgactttacgagaaggaaccgggattgaataaagtgatcctcattccagataagtaa

SEQ ID NO: 88 - DNA, 978 bp, synthetic construct
  source 1..978: mol_type = other DNA
atgaaagctatggtgtggcttggacccgaacgaatggaagtgcgagatcttcctgcgccgcgaccgggtgcaggtgaagtgctggttcagacggaagctgctggaatttgtggctctgaagtggaggcctatttgggtcgcatggctaatcgaacaccgccgttggtgatgggtcacgaatatgctggacttgtcaccgaggtcggagagggagtcgaccgcgtctggtcccgtcgacgcgttgcggttaacccgattgttggttgcggtcgttgtcgaaactgcgccgccggtgatcgaaacttgtgtcctgatcgtcaccttcttggcattgcagcgccaggaggattcgcagcgttctcggtggttcccgaacgatgcctcttttctctgcctgaaggaatggatgcgcgactgggcgcgctcaccaagccattggccaacggtgtgcatcttattcgcaaaagcggcgcgggacgaggccgagttgtggttatcggcgcgggaactattggactcggatgtttgcaagctgctttgttgcacggtgctgagcaagttgacgtcgttgaacgccatccgggacgacgccgtcacgcacttgccctgggagcacgccaggcggtggcggaattggcagatgtcgaacctggtgctgatcttgtggttgatgccgcaggatccgaagcgacacgccgcgcggccgtggaattggttggcccggcgggaacggcctcttttgttggactccactccgacgaaactgtcctgccttggcatcgcattatccgagccaatattcgagttcaaggaacatttggctacgcagatcgtgatttccagcaagctcttgactggttggcagcgggaaaggcagccattccattgtctgaactccgccccttggacgatggcccagcggccttcgagcgccttgctcgtggaccgatcgacgaaatcaaagtctttttggcttaa

SEQ ID NO: 89 - DNA, 1014 bp, synthetic construct
  source 1..1014: mol_type = other DNA
atgaagtcgttgatttactatggcccgcacgatctgcgatatggagattctcctaagccaaagatccgatctggagaagtcctcctccgaatcaaaagcgtcggtatctgcggcactgacctccacatctataacggaggcatgaaaaatctgccgttgcctctgattatgggtcacgagttcagcggagttattgaagagcttgcccgagacgtgaagaactttaaggttggagatcgagtgatcgctgaacacgttatcaattgtggaaaatgttcgtattgtcttagcggcaagccgaatctgtgtgctaactctcgcattattggagttcaccgccccggagcgctcgccgaatacttggctgttcccgcggacctggtgtacaagatcccggcgaaactgtcttttgaagagggcgcaatgatcgaacccctttctatcgcctattatgccgtgaagcaagctcgtagcatcctgggtaaaaaggtggcggtcatcggccaaggacccatcggcctgctgcttgaccaaatcctccgcgacgcaggcgctgaagtcattggcattgacatcgcagattggcgattgaaactcgcgaagaaaaagaagtgggcagatcatacaatcaactccagccagaaaacctggctcaagaagatccagaagatcgcaccagaaggcgtggacacagtgtttgaggttgttggccgtgaggaaactgccgagatggctattgaaatcgcgcgtcgagatggtgacgtttttatcctcggtgtctttgaaagcgccgcatctttgaacatgatgaatattgttaagaaggaactcaacgtgttcggaagctggacctgtgcgttttctttccccccttcgattgctctcgccgttgccaagaaagttgatttgaaatccttgatcacgaatcgatatgacgtgaaggacggtgccctggcatttaaggagtctgcctcttataaaggtaagcgaatcaagactgttatcaacttttaa

SEQ ID NO: 90 - DNA, 1044 bp, synthetic construct
  source 1..1044: mol_type = other DNA
atgaaggcaatgttgcttagccagtatcgacgactggaaattgccgagttgccgacaccgatccctggtcgtggcgaactcttgatccatgtcgcggcatgtggtatttgcggaagcgatgtgcacggatacgatggcagcagcggacgacgtatccctccaatcgtgatgggccatgaggctgcaggacgtgttgcggcactcggtccgcaggtcacgggctggtcggaaggtgatcgcgtcacattcgatagcaccatctcctgcggcacttgcccttactgctcccgcggcgagattaacctctgcgaccgtcgtcaagtgcttggagtttcgtgcggtgactatcgttgcgctggagcttttgcggagtatgttattgtgccgcaacgcattgcttataaattgccggatgccttgagcttctcggaggccgcaactttggaagcggtcgcggttgctgtgcacgctgttagcctttcccaggtttcgccaggtactcaggcactggttattggcgctggtatgattggcctcctcaccttgcaagcgctgcgcgcagccggttgcagctccgtggtgatcgcggacgttgatgcgtcccgtctgcgtttggctaaagaggttggcgcaaccgaaacgcttaatgcgacaggagatgaatttgttgccgaaatcttcaaacgcacaaacggagcgggcacagaccttgccgtcgaagctgtcggtatcgatgctaccgtccgaacggccattaactctgtccgaaaaggcggtacagttaccctggtcggcaatatcacgccggaggtcactcttccgcttcagaaggtggtgacacgccagattcgaatccaaggttcttgcgcatccgctggtgaatacccccgagctatccagctccttacgtctggcgctattaaagtcaaacctctcattaccgctgtggccccgcttgaagacggtcctcagtggtttgagcgcctttacagccgcgagcctaatcttatgaaggtggtccttaccccgggcagcgtgtcttaa

SEQ ID NO: 91 - DNA, 1035 bp, synthetic construct
  source 1..1035: mol_type = other DNA
atgaaagcgatggtgttgaaagaatataagtatctggaaatcgaagacattcctattccgcacatcgaagcagcggacgaactgttggtccgcgtgaaggctaccgccatctgcggttcggatatccatggttttgatggttccaccggacgccgtaaaccgccattggtcatgggacacgaggcatcgggtgttgtcgaaagcgtcggaagcgaagttaaatcgctgaaaatcggtgaccgtgtcaccttcgactccacagtttggtgcggcgaatgctacttttgccgacagggtcaggttaacctgtgcgacaaacgacgtgtgcttggtgtgtcgtgcgacgaataccgcaaggacggtacctttgcggaatatgtcattgtgcccgagcgtattgtgtataagttgccggataatgttgccttcgaagaagcagcattgactgagccggtttctgtcgcgatgcacgcatttgatatcaccggaatgaagccaggagaaaatgcggccgttatcggtagcggtcttatcggactcctcctgattcaaattatccgtgcttattcgccccacttgatcatcgcgttcgatacagacgaaaaacgccgaaaagcagctatcgaagctggagccgatattgcattggacccccaagatcctgagtcgcataaaactgtcctgagcatgactaataaccgaggtgtcgaccgagcatttgaggctgtgggcgcctcggcagcgatcggtacagctattgaatccgtccgaaaaggctcgtccgtcactctgatcggcaatattagcaataaagctgagatcccgctccaatctgtggttacgcgccaaattgcccttttgggttcgtgcgctatttctggagagtatcctgtctctttggctttgatggcgaatcgcactattgacgtgcgtcaagttatctccgcaatcgcccctttggaggagggtcctctgtggttcgaacgcttgtataaacgcgaacctggtcttttgaaggttgttctcacgccgtaa

SEQ ID NO: 92 - DNA, 1047 bp, synthetic construct
  source 1..1047: mol_type = other DNA
atgaaggcactccgcctgtacgctccaggtgacttgcgtttggaggaaatcccaattcctttgccacgtcccgatgaggtgttggttcgcgtgcttgcgtgcggtatctgcggttcggatatcccccgtgtttttgaacacggtacgtataaatacccattggtgccgggccatgagttttccggtattgttgaaaaagtcggctccgaaacgggaaaagattgggttggtcgtcacgttgtcgtctatcccctcatcccgtgtcgacaatgctcctcttgctactctggtctttatacccaatgcctcaactacgactacttgggatctcgccgtgacggaggatttgcagagtatgtgactgtccctgtgaataatattatcccggtccctaatggaatctctggagagatctcggcgatcactgagccatgtgcggtcgcccttcatgccgttcgcaaggcccaagcctgcgtgggtgacacggtccttattacgggagctggaaccattggtatcttgatcgccctctgggcgcgagcagcaggtgccgaagtctttatgactgacattgtggtgggaaagttgaaactggctcgttcgttgggttttcagcatctgctggacgccaaacaaacaaatgtttctgaatgggttaagcaaaagtgtaaacacggagttgatatcgtgttcgaaaccacgggacatcccgcgggactcgaaacgtcgattgactcttgttctattacaggcaaaattattctcgtgggcaatcccagcttcgaagagatgaaagttccggctaaacaatatggaatgattctgcgcaaggagatccagattactggaatttggaattcgctcatcaacgaatatccaaaaaacgagtggcaagttgtgctgcaagagttcaagaaggagtcgtccttgtactcgaagattatcacgcataaggttcccattgagggccttaaggaattgtttgtgacgatttacaacaaacaggtctttccggtgaaggctatgtttatcaataaggagatctaa

SEQ ID NO: 93 - DNA, 1014 bp, synthetic construct
  source 1..1014: mol_type = other DNA
atgaaggcagtcgtgtacacgcaaccagacgcagtggccgtccttgagcgtgaaatgcctgcactggtgccaggagaggtgcttcttcgaattgatgccagcggaatttgcggttccgatttgcacgcatatcatggacatgacccacgtcgtaaacctggacttgtgttgggtcacgagtttgcaggcaccgtggttgcttctagcgatgaaagccgcctccctgtgggtcgacgcgtcacggctaatcccctcgttacatgcggacactgtgattactgccttcagggccgtgacaatctgtgtgcgaatcgtggcatggtgggtatgtctcgccctggtgccctttctgagtatcttgccattcccatgcgatgcgctattgctattcccgaagatctgccgagcgtgtctgctgcgcttaccgaacctgctgcgacggcactgcacgcagtcaatcttacaatgcgagcgatgagccgacctctcccggaggcgcgtgttttgattatcggaggtggagcgatcggcatgttgaccggagcacttgtcggtgcgtacggctgtcgctcccttgcggtcgcggaaaccaacgccctgcgccgtgcgtccgtccgacgtcatcttgcatgcgaggttttggaccctacagcgaacgccccggctgagtcttcgttcgacgtggtcattgacgcagtgggtgcggcaccaacccgccatctggcactggcggcaacgcgaccaggaggtgttatcatgcacattggactccaggcatggtccagcgaaatcgatatgcgtaagctcactcttgctgaaatcactctcctcggtacgtatacatacacgatggcggatatgcatgcgaccgtgcgagcacttgcctctggaagcttcggatctctggaatgggtcgagacgcgagccctgacagatgcgccatctgcttttgctgaccttgctgcgggtcgagtcgcggcgggcaaggttgtgcttctcccgcaacaggactaa

SEQ ID NO: 94 - DNA, 1044 bp, synthetic construct
  source 1..1044: mol_type = other DNA
atgaagtccgtcgttattcacgccgaaggagatgtccgtgtggaagagcgacccattccccatttgcaaacggatgaagatgttttggtgaaagtcgtgtcttccggactttgtggcagcgacattccccgcatcttcaatcgtggcgctcattattacccaatcacacttggccatgaattctcgggctatgtcgagtcctatggagcgggtgtcactgacttgcaaccaggtgatgctgtcgcttgtgtgccgctcctcccgtgttttcactgcccccagtgcgagcgaggttacttctctctgtgtaagcagtatcaatttgtcggttctcgcagcgagggaggaaacgcagagtatgtcgttatgaaacgagcgaatcttttccgactcccgtccgatatgccaattgaagacggagctttcattgagcccatcaccgtcggtctgcatgccttccaccttgcgcagggttgcgagggaaagaatgtcattatcgtgggtgcaggcaccattggcctccttgccctgcaatgtgcacgagaactcggagccaaatcgattaccgcaatcgacatcaacccacagaagcttgcattggcaaaggagctgggcgcgacttacgtgtttaattcccgagaaatgtcggcgaccgaaattcactctgatttggaaaatgtgcagttcgaccaacttattctcgaaacggctggaacgcctcagactgtcacgctctccatcgaaattgcgggtccccgagcccaattggcgcttgttggtacgttgcaccacgatttggcgcttgcgtcgggtgtctttggtcaaatcttgcgcaaagagcttactatcctcggatcttggatgaactacagctctccctggccaggcgaagaatgggtcactgcggcacgtctgctgacggagaaacgtttgcaattggaaccacttattgcgcactccggagatgccgaatcctttgcgtctgcagtgaagtctctcaatggcgcacctatgcaaggtaaaattctgctcaagctttcgtaa

SEQ ID NO: 95 - DNA, 1041 bp, synthetic construct
  source 1..1041: mol_type = other DNA
atgaaatctgttgtgaacgatacggacggtattgttcgtattgcagagtcggtgattcccgaaattaaacaccaagatcaagtgcgtgttaagatcgcctcttccggcctttgtggttctgacctgccgcgcatttttaagaacggagcacactattatcccatcactctcggacacgaattttcgggatacatcgatgcagttggctccggtgtcgatgatcttcatcctggtgacgccgtggcatgtgttccccttctgccctgttttacctgtccagaatgtctgaaaggcttttacagccaatgtgccaagtacgattttattggatcccgtcgtgatggtggtttcgcggagtatatcgtggttaagcgaaaaaacgtgtttgctttgcccactgacatgtctattgaagatggagcctttatcgaaccaattacggttggccttcacgcgttccacctcgcgcaaggttgcgaaaataagaatgtcattattattggcgccggtactatcggcctgcttgcaatccagtgtgccgtcgctctcggtgccaagtctgttaccgccatcgacatctcgtctgaaaaactcgccctggccaagtcttttggagcgatgttgacgttcaattccttggagatgtccgcccctcagatgcaaggagtcctccgagaattgcgattcaatcagttgattctggaaaccgctggcgtgcctaagaccgtggaactggcggtcgagattgctggaccccacgctcaactggccttggttggcactttgcaccaagacttgcatcttacgagcaccacttttggaaaaatcctgcgcaaagagcttactgtcatcggatcttggatgaattattcgtccccttggcctggtcaagaatgggagactgcatctcgtctcctcaccgagcgaaagttgtctctcgaaccgttgattgctcatcgtggcagctttgaatcgttcgctcaggctgtccgagacattgctcgcaatgccatgccaggaaaagtgcttctgattccttaa

SEQ ID NO: 96 - DNA, 1020 bp, synthetic construct
  source 1..1020: mol_type = other DNA; strain = K12
atgaaatctattctgattgagaaaccaaaccaattggccattgttgaacgtgaaatcccaactccatccgccggtgaagttcgtgtgaaagtgaagctggcgggaatctgcggatccgattcccatatttaccgtggtcataacccatttgcaaaatatcctcgtgtgatcggacacgaattttttggtgtcattgacgcagtcggagaaggtgttgaaagcgcccgcgttggtgaacgagttgcagtggatcccgtggtgtcgtgcggccattgctatccctgctctatcggaaagcccaatgtttgtactaccttggcggtgctgggcgtgcatgcggacggaggcttctctgagtacgcggtggttccggccaagaacgcgtggaagattcccgaggcagttgccgatcaatatgccgtgatgattgagccgtttacaatcgccgcgaacgtgacgggacacggtcagccaactgaaaatgacactgttctggtgtatggcgctggacccattggcctcacaattgttcaagtcctgaaaggagtgtataatgtcaaaaacgtgattgtcgccgatcgaattgacgagcgacttgagaaggccaaggaatccggagctgactgggctattaataatagccagacaccgctgggcgagattttcactgaaaaaggcattaagccgacgctgattattgatgccgcttgtcacccctcgattctgaaggaggcggtgacgctggcttctccagcggcacgtattgttctgatgggattctcgtctgaaccatctgaagttattcagcaaggaattacgggcaaggagctctctattttctccagccgccttaacgcaaacaagttccccatcgtgatcgattggctctccaagggcctgattaaaccagaaaagctcattacgcacacgtttgattttcaacatgttgcggacgctatcagcctttttgagcaagaccagaaacactgctgtaaggtgctgctcactttctccgagtaa

SEQ ID NO: 97 - DNA, 1074 bp, synthetic construct
  source 1..1074: mol_type = other DNA; strain = cp400
atgaacattccgaccaagatgaaggcagtcgttaaatcggaggcaggttatgacaatatgtccctgcaagagattcctgtcccagaagttaagggaaaacaggtgttgatgaaagtcgcctatacgggtatctgcggtacggacattcatacctttaaaggcgagtacgccaatgccgtgaccccacttgtcctcggccatgaattttctggcaaggtcgttgccgtcggagatgaagttaccaaggtcaaaccgggtgaccgagttacctccgaaacaacatttgatacatgcggagagtgtgtgtactgtaaaaataaggaatataacctgtgcgaaaaccgttcgggtattggtacgaaagccaatggatcgatggctaattatgtgcttacgcgagaggagtctgtgcatgtccttcctgacaatgtttcctacaaacttgccgcgatgtctgagccgctggcttcctgtgtgcacgcaatgtaccagaaaaccccgttcacccttcatgatacagttctcattatcggccccggacctatgggtttgctctctctgcagattgcaaaggaaattggagcctttaccatcgtctccggtattacgaaagacagcgaccgcctggaaatcgcaaaagaacttggagccgacatcgttgttgacacgcagaaggaagacttggcgaagatcgtcatggaggctactaacggagtgggagttaccaaagtctatgattgtagcggcgctacaccagcggtgaatgctgccctcccccttctgaagaagggaggtacttttcagcaggttggcctgtttgcaaagcctctgaacgaattggatgaacgtacaattattcagcacgaaattacatacgtgggatcccgttctcagaatccgtatgattggcctatcgccattcacctggaggccaaaggtgctattaatgaagataaaatggttacgaaagtcttcgatttggatcattggcgtgaggcattcgaggctatgatggctggaaaagaactcaaggttcttattgccagcaatccagacgacgaaactcttaattaa

SEQ ID NO: 98 - DNA, 1053 bp, synthetic construct
  source 1..1053: mol_type = other DNA
atgaaagccgcggtcctccatggaacgaacgacatgcgcttcgaggatattgaaatcaagccgtgcgaaagcgacgaggtcaagatcaaggtcatggccgctggcatttgtggatctgatcccccccgagtgctgaaacattggaagtatcctgttccggctattcctggacatgagttctctggtgttatcgcggaggtcggaaaagatgtgaaaaatgtcaaggtgggtgaccgagttgtggcgatcccctttattccgtgtaatgaatgtgagtactgtaaacgaggtctttttagcctttgtgacgatcacggaatgctgggtgccaaatcctttggagcatttgccgagtatgtgaacattaaggcgactaatgtccttcccatcggcgatatggatttcgaagacgcagcgatgattgagccccttgccgtcgccatgcacggagtgttgaacatcggagttcaagtgggagatacggtcgccgtcatgggctcgggcacaatgggtcaacttgtgattcagggtcttaaaattgctggtgctggcactatcattgctgttgacatttctgataacaaactgcgagagtccaaggaattgggcgctgacattatcattaacgcaaaggacattaaccctgttgaaaaaatcaaagagcttacaggcggaaaaggagtggacatcgctctggaatgtgcgggttccaaaattacccaagagcaatgcctcttgatcactaaaaaaaagtcgaagatcggtttcctgggaattgcgtactctgacattaccttgtcggaggaggcgttcgagaacatctttcgcaaagagctcgaacttaaaggattctggaacagctattcggcaccctttcctggccaagagtggaccaagggcattaatcttgttaacgagggaaaaattaagctgaaggaaatggtttcgcaccgcttttctcttgaggatacgtataaagcgttcgagatgatccgagatcgcaaggaagagtttaacaaaatcctgatccttccccagggcgtggaaaaataa

SEQ ID NO: 99 - DNA, 1053 bp, synthetic construct
  source 1..1053: mol_type = other DNA
atgaagtcggtccgattttatggaattcgtgatacacgagtcgaagacgttgacgtgcccaagattctggaaaaggatgacgtcattatcaaggtcaaggtggcgggcatctgtggttctgacattagcaaatactcgaaaacaggcccgcacatggttggcgagattttgggacacgagttctccggcgaggtcgctcaggtcggcaaggaagttcgctccttcaagatcggagatcgagtcgcagtttgccctgcgatgccctgcttcgagtgtgatgagtgcaaaaaaggtttgtattcccgttgcaataatgtcgctatcatcggaaataaggagctcggaggatgttttgcggagtacacgaaagttaaagagcgcaatctgattaaaattccagatgagattagctacgaaaccgctgcggcccttgaacccgtctgtatcgcaggacatggtcttttccgctctgaagccaaggtcggagatacggtcgttgtgctgggaacgggtcctatcggattgttcagcattcagtgggccaaaatctttggttccacgaagattatcgcggttgacgtgtttgacgaaaaactggacttggcgaaagagctcggtgcggatatttgtattaatgctaaggagaaaaatatcgttgaagagatcaaacgactgacagacggagatggtgcagatattgtcattgagtctgccggtaccccgcttacatgtggccaggtgcttctgctggcgaaaaaaggtggtactgtcttgtatgcaggcgtcccatacggcgacgtcgcccttactcgagaacaatttgagaaaatcgttcgaagcgagcttacggtgaaaggaacttggtttggcaattctttcccatttccgggaaaggaatggtctgctggcctgtaccacatgcagaaaggagacatgaacgtggaaaagcttgtcactcaccgtatcaatctggaagaagctccagcatacttcgagaaggtttataaacgtgatatcttctttggtaagattatgattaatattgacaattaa

SEQ ID NO: 100 - DNA, 1050 bp, synthetic construct
  source 1..1050: mol_type = other DNA
atgaaagcttccatgctggaggacttgaacaaattcagcgtcaaagagatcgacatcccgtcccccaaaaaggatgaggtcgtcgtgaaggtgatggcggcaggcacgtgtggatccgattcgcataaaatgattagcggatggaaatatggctatcccgcggtgatgggacacgaattttctggaattgtgacacaactgggagaaaacgtgtccaacgtcagcgtcggtcaacacgtcgccgtggctcccttcattccctgcttcaagtgtcattattgtcaaatcggactcttccagatgtgtgaaaattattccatgctcggtcagcaaaaatttggaggtttcgagcaatacgtttccgtcccggcacgtaacgttctggacatcggcaagatgtcgttcgaggaaggtgcccttattgaaccgatggcagttgcggcccacgctgttatgggaattaaaccggagctgggtgatacagttgcggtcttcggcctcggtacagtcggagatcttgttgtccgtcttcttatttcctcgggagcgacaaacgtcattggcattgacattgacgaccagaagcttgaaaagggactggatgagggttgcacacacgtgatcaactctgccaaagagtctcttgaagaaaagatcatggaatacaccgacggtctgggtgtcgatatttccatggaatgcgccggcagcaaaatcactgaggagcaaacactgctcgttacgaaacgccgtggaaaggttggatttgtcggtattgcttatagcgacgttctgctccatcagaaagcatttgagaacatcttccgccacgagcttacggtgactggattttggaattcctattccgcaccatttcctggacgcgagtggaccaactcgatccaattggttaatcgtggtcgtatcaagatcaaagatctcattactcatcgatttgagcttgaagacatgcaaaaagcattcaatatgatcaccactcgttcggaatcgtttaataaggtcatgtttttccccaacggcatcaattaa

SEQ ID NO: 101 - DNA, 1065 bp, synthetic construct
  source 1..1065: mol_type = other DNA
atgaaggctctcaatttgtacggtatccaggacctccgctttgaggaaacacccgctccctctatcgaacatgatgacgatatcattatcaaagtcaaggctgtcggaatctgcggatccgatttgtcgcgttataagaaactgggaccttatgtccctggaatgacttttggacacgaattcgcgggagaggtcgtcaaaattggtcgttccgtgacgggattttctatcggtgatcgtgtcgctgcttgccctacttatacttgcggccagtgccgttactgtcaactcggcgagccgacacgatgtgagcgactgtctgtgatcggcgcacgccacccaggtgcatacgcagaatacgtcaaacttcccgcgaagcatgtcatccccttgcccaacgttgttaactatgacgaggccgccctcattgaaccggcttcggttgttgcgcacggcttttatcgtactaacattaagccaggtgcaagcgtcgctattatgggcgttggctcgatcggtctgctcgccgtccaatgggcaaaaatcttcggtgcgacaacggtctttgccattgatattgacgaacagaaacttaacgtcgctaatcaacttggagcagatgtcttgatctccagcctccaacgacccgcacacaagcaaatccttgaatataccaacggaatcggtgttgacgtggctgtggagtctgctggtacaccttctacctccgcccaggtgtttgcgctgccgaaaaaaggtggtgaagttgtctttcttggtattccttatgccgatgtccagattgaacgattttacttcgaaaaaattgttcgtaatgaactgcacgtttacggatcttggaatgcactctcctccccattcccgggtaaagagtgggccacgactatccattatatgtcgtccggacaattgaatgtcgcgcccatgatttcctaccgactccctctcgctaagggccccgagacgttccagcagatcgcaaagggtgaactcaagcccacaaaagtccttttctatcctgagaagttgtctgagcgcaagtaa

SEQ ID NO: 102 - DNA, 1056 bp, synthetic construct
  source 1..1056: mol_type = other DNA; note = Lachnospiraceae bacterium
atgaaagtccttagcctgcataagcctggcgatattcgatttgaggacgctccaatgcctgagccaggagagggcgaagtgctgctgaaagttatggcatgcggcgtctgttcgtcggacgaggctcgaattttcaaggacggtgcccatattatgccaattgttcctggccacgagttctgtggccaagtggtgaaaacgggagcaggagtggacgaaagcctcatcggccgaaaagcgagcgtcttcccaatgcttccctgtttcgaatgcccttcttgtaaacgaggtgactacgcaacctgttctaactataaatactatggttcccgcaacgatggtggaatgggagaataccgagcaatcaaggcgtggaacctgaaccttctggatgattccgtcgattattgcgtcggcgcactgtccgagccatccgcggttggccatcacgccactgaagtgggaggagtgaaagccggagacaaggttttcgtcattggtagcggaaccatcggacttttgatcggcttcttcgctcaggctaagggtgcagaggtttggatcggtgcgcgtcgtaaagagagcaacgatttcgcggcgagcctgggttttaaaacgatcgacaccaataataccgaagacgaggttgcaaaggccacggatggtaacggcatggatgttgtcttcgaagcagttggtagcaataagtgtcttattgaagctattggatctgtcacggcgggaggcacacttgtcaccgtgggcaatcctgtgggagacatgaatcttccccgagatgtgtactggcgcatcctccgaaagcaactcacggtccgaggtacttggaactctagctactctgacaaggccaatgactggcacgaagtggccgcgttgatgaaagaaaaaaaaatcccgttcgaaaaactcatcacccgtaagtacaaactttctcaatgcgatgaggccttcgattttttccgtgaccactctattcagaagtcccgcgtgatgtttgttatgcacgaaaaagaatccgaagcttacaacggataa

SEQ ID NO: 103 - DNA, 1011 bp, synthetic construct
  source 1..1011: mol_type = other DNA; note = Faecalibacterium sp. OF03-6AC
atggtcaacatgatgaaagccctcgtgtttactgcgccccatacgttcgagtatcgtgacgttccccgacccgaacccgcccccgacgaggtcctggttgaggtgaaagcatgcgcaatttgtggttctgatgttcacggtagctcgggcgaaaacggtcgacgcattcctcccttggtgatgggccatgaggcaagcggcactatcgcacaattgggcgaagctgtgcagtcgtgggcagtgggagatcgcgttacatttgactctactgagtactgcggctactgttggttttgcacgcacggtatgcacaatttgtgcgcccagcgacgtatcgtgggcgttgcgtgcacagagtaccgtaaaaatggtgcaatggctcaatacattgcagtgaaagcccgtaccctttatgctttgccgccggcggtctcctttgaacagggttgccttgtcgaaccctttgctgtgggtatgcatgctgtcttgcgatctggactggcagcgggacagacggccgctgtgattggagatggaacaatcggtctgatgactcttattgcggccaagagccagggagcacaagtctgtatcagcggacaccacacccgtcccatgcagctcgcagcccagctcggagccctggattgtgcccaactgccccagctgacagctgagcgaggtgcggacgttgtttacgacgctgttggctctcaatccagctttacgcaagcgatggagcttgtccgtaagggaggccgaattatggttatcggcaatcatgcacgcacgatcgattttcctttgcaacgttgtatcacggaacagatcgacgttcagttttcgtacagctctgccggtgagtatcctgtttgtcttcaagccattgctgagggacgcgcagatttgacaggactgtggcaatctttcccactggctgagggcgctcaagttttcgaccgcctggttcaccgagatgagtccctgacgaaagccgttttgatcccataa

SEQ ID NO: 104 - DNA, 1074 bp, synthetic construct
  source 1..1074: mol_type = other DNA
atgaaggcctatgttttggatggtattggccagctgaatcaacatgagtatgtcctccgagacttgcagcctggagaagccctcgttcaagtggctgcggctggtatctgcggtagcgacctgccccgcatctttgagactggaacttatcattttccaactatcccaggccatgaattcgcaggtgttgtcaaagaactttatgctgatgccgacgaagaaatgctccgacaatggatgggtaagcgcgttgcggtgtttccactgattccctgtcgaacctgtcgaagctgcgcgaatcatcagtacgagatgtgttctaactataattacctcggctcgcgtacggacggaggcttcgctgaatactgtatcgtgcctgtttggaacttgttgcagttgccggacgaggttagcttcgcacaggccgctatgatggaaccggcagctgtggcattgcatgcaatccgacgtggcggcctgcaccccgaccaccccgagaccggtatcggcaagcgtgttctggttatgggacttggcactattggcggattgatcgcccagtggcttagccaatgtggcgttacggagctcaccgccactggtcaccacgccccccaggaagagcttatgcaccgatatgctaacgagaactaccgattcattaatactaatcaaactgcttggaccgatgacgaaaacacctacgatcttatttttgactgcattaatgacagcgaatccgttcagcaggcgttgcgctacgtcaaacccggtggtcagattgttgctgttggcaacccgaaaaaagatcttactcttcaaaaggacatctattggaaactcctgcgaaaacaagtgtgtatgaccggaacatggaactcgagcttcagccatgattcgaacgatgactggcagatcctccttcgataccttcaggagcaaaagctgcatccgcaggcacttatcacacatcgccttccgtttgcccaacttcccaagggcttggagatcatgcgtcttcgtgaagagttttacaacaaaattatgatcgacttgactgtctgttcttaa

SEQ ID NO: 105 - DNA, 1029 bp, synthetic construct
  source 1..1029: mol_type = other DNA
atgaaggccgtgacttacactcccgaccagggttttgcattggtcgaggttgagacaccccagcttggacctgacgaagttcttctccaggtggaggcttgtggcgtctgcggaagcgaccgtcaagtcgttgcaggcgaatcggttcctaccggtaccgccttccctctggtgatgggccacgagattgccggacgtatcgccgcgttgggcgaaactgtgacagattggcatgttggagactctgtgattgtccatcccttcgtggcatgtggtacgtgcgcaccctgtgttcacggccagcctaacttgtgcgtccgacaggtgtgtattggttatcaacgacctggaggatttgcagagcaagttgctgtcccggctcgtcaactggttcgacgtccagcagaattggcaccggccgccgcagcattggttgtggatgcgtttgccacgccataccacgcgatgcgagcggcgggtgttgagagcggccaaaccgttttgattattggaaccggcggacttggtctcgcggcacttatgctggccatgggcttccatgtcggccgtctgggcgcggtcacgcgacgccaagagggtattgcaatcgcggaggctcatggcgcgcagatggttgtcgtcacggaccaggatgagcgtacaattgcgcgccagcttcgccgctggtctggcgcatccggcattgacgtcgtcatcgatacggtcgctactgctgacactattacattggcagctgaaagcgttcgcccaggaggcactatcgctattgtcggaatgtcggccgacaccgccctctatcctgtcgctaagaccgttcgccgaggtctgacattcgttgcgagctacggatccgtccgagaggatgtcgagcagttggtcagctgggtggcagaaggtcgactggacccggttcgactcgtcgcgggagccctcccactccatgaagccgctcgtgcattcgccccggaccgacccgccggacgttgggttattgatccatctgaataa

SEQ ID NO: 106 - DNA, 1074 bp, synthetic construct
  source 1..1074: mol_type = other DNA; strain = KGMB03662
atgaaaagcttgattaatatcccggaaaaaatgaaagccctcgttttgtatggtgttggtgatttgcgtgtcactgaagtggacgttccgaagctcgaaaaaggaacggtcctccttaaaattaaagcttgcggcatctgttcctccgacatgcctcgttgtttcgttactggcacttaccattttccgaccattccaggacacgagttctctggacaaatcgttgcggtgggtgatgatgttgatgaatccttgttgggaaagcgttcgtgcgttttccctatgcttccctgcaaacactgcaaagcttgcaagatggaggaatatgctcagtgtagcggctattcttacttcggctctcgccaagatggtgcctgggcggaatacctcgtggtcccggtgtggaacctggtgccctttgacgatacactcgattataaaactgcagccctgtgcgaaccagctgcggtctctatgcacgccgttaatattggagacattaaagaaggtcagaatgttgtgatcatcggaacgggtaccatcggattcatgattgctctctttgccaaagaacgtacgaaaacaggaaaggttgtgatcgcgggacgctcgaaaaataagctggaatacgcgaaaaagttgggcttcgatgtcgttgacacctcggttgacgatttgcctgcccaagtgaagaaaatcatcggtattgatggagctgacgtcacattcgaagcggtcggctccaatgaggccattgcctctgctattgaatctacgggcgctttgggttcgattgttcttgtcggtaatccttccactgatctcatcttgccaaagaatatttattggtccatcctccgaaagcaaattacagttaaaggttcctggaactcgtcttataactctcgcgttaatgactggaagaaagcgttggaggtgtttgagcatagcgacgtgaattttgcagacttgatcacacacacattcactatcgaagaaaacgagaaagctttttctgccatccgtaacactggagaattcactctcaaagtcatgtttaccttcgatgattaa

SEQ ID NO: 107 - DNA, 1047 bp, synthetic construct
  source 1..1047: mol_type = other DNA; note = Clostridiaceae bacterium
atgaaagctgtcgtcctgcatggtaaaaacgacatttgctatgaagaatggcctgaacccatcctgaaaacaggaacagttaagattcatgtcaaggcttgtggcatttgcggctctgacattcctcgcgttctcggagattctgcccattactacccgatcatcctcggccatgagttctccggttgtgtcactgaggtggctgatgacgttgacaagatccaggttggcgatcatgttgcaggagtcccccttctcccgtgcatgaaatgcgatgattgtcaacagggaaactattctcagtgtaaacattactcttttatcggcagccgcgagcaaggtggatttgcagattatgttgtgatcccagccgataacgtggttaaagtcgacccaactcttccttacgaacaggtcgcactcttcgagccttgtactgttgctttgcatgcactcaaagtctcctcgtataaaggaggaaaacgagtggcgatcctgggtggcggcacgattggtctttttgcactccagtgggctaaaatctatggcgcgtcccaagtcacagtcttcggtcgcagcaaggaacacttgaagatcgctgctgctctgggtgccgacacaactatttccactctggacgataattttatgacagaggctatgcgagtcacagagaaaaagggttttgactacatttacgagtccgccggttccacaatcaccatgaagcttgcttttgaactggcagccaaccacgcgaaaatctgtttcattggcacgcccacggaaaacctgactttcagccctaagctgtgggagaacatgaatcgaaaggagttccagcttatgggttcctggatgtcgtgttcggcgccgttccccggcgatgaatggaaggagacagcccatttctttaacaccggacaacttcgatatgtgcctgagatgtttttcgcacagtatcccatggacgatgttaaaaaagcgttcgagcagttccataacaagaataaagttaagggacgtatcctgctcaaaaacaagtaa

SEQ ID NO: 108 - DNA, 1014 bp, synthetic construct
  source 1..1014: mol_type = other DNA; note = Thermoplasmata archaeon
atgaaagtggcggtttggtatggtgacaaaaatattgtcttggaggaccgtccgatcccttctatcggtgaaaaggacgtcttggtccgtgtcaagtcgtcttccatctgcggagctgaccttcatgcctacaaaggcctctctaagcgccgcaagcctccattggtgatgggacatgaattttccggtatggttgaacgcctcggcgatgagacaaagggccttaaggtcggcgatcgtgtcgtggtggagcccattattagctgcggaaagtgcaaggcatgcaaaaagggaaaaacgaatgtctgcgaaaatcgtaagctgatcggtctgaacctcgacggtgctttcgctgaatatgtttctgtcccttatgaaaagtgccatgaactcccccgtgacctttcgttcgatgagggtgcgattatcgagccgttggccgtcgccgttcatgcggtcaatattactcccatctcgtcgaacgataacgtgcttatcattggtagcggtgtgattggcctcctcatcacacaattgcttcgaagccgcacttcgggcgacattttggttaccggacgtcgcgattacctccttgaaaaggcccgtgaatttggtgccacagatgcaatcaacgtgatcgactgcgatgctgtgaaaacgctgctcaaaaaacacggtcgcgtcgatgttgtcttcgaagcagtgggctctaacgagactgtgaaccagtccatttccctggtcgaatctggaggttctatcactctcgttggcatgctcgatcgcgagatgaccgttgatatgatggaggttgttgcccgtgaaatcactctgcgaggagattatggttatacaactgacgactttaaggaggcgatcgagctcgcttcttcgggtaaagttgatctcaaaggcctcatcacgcatgttctcccgctcgatgagatcaaaaagggcttcgatatcctggcagaacgccgagaaaatgtgatcaaagttgttattaacccataa

SEQ ID NO: 109 - DNA, 1032 bp, synthetic construct
  source 1..1032: mol_type = other DNA; note = Lachnospiraceae bacterium
atgaaagcactggtgttggaggaaatcggtaaattgacccttaaagaggttgagacgcccgtgccaggacgcggagaggttttgttgcgcatccatgcctgtggtatttgctcttcggacaaagcccgtctcttcaagaacggtactcacaccatgccgcttatcccaggtcacgagatctcgggtgagattgttgcaggaggtcccggcattcgagaagagcttatcggccgacgcgctgcggtcttcccgttgattccttgtcgccaatgcgactcctgccgaatcggcaagtacgctcaatgcgagcattacgactatttcggatcgcgtcgagacggaggctttgctgagtacctcgctgtccccgtgtttaatatcaatcttcttcccgatgatatggattatcatacggctgcattgtgcgaaccagccacggttgcatctcatgcacttaagcgcgccaaaatgaaatctggtgatatcgttacgatcattggcactggcacggtcggcctcctggctgctggcatcgctcgtattcgacgagcatctaaaatcattatcgtcggacgaagcaaagaaaaaatcatgaatgcagctcatttcgctgatcatgtgatcaatgcagagggatgggacgtgaacgaggccgtggcttcgctgacggagggtcacatgagcgatgtggtcttggagactggcggcaacagcgatgcttgcacgtacgcgcttatggctgccggcaaaggtacgactgtgatgtttattggcaatcccgaagaaccgattgtttttaaccgtgatatttattggaagatcctccgaaacgaactgacactcaagggtacttggaattctggatatgctcctgaggataatgactggaatgacgtcatccgttatatggcagatggacagattccggcagataaaattatcaccgatagctttccattggaagattataataaggcattcgagcttcttctctcggatcgcttttacaccaaaatcatgtttgacatctaa

SEQ ID NO: 110 - DNA, 1047 bp, synthetic construct
  source 1..1047: mol_type = other DNA; strain = DSM 16973 = JCM 13450
atgaaagccaatgttctgtaccacattggtgacctgcgatacactgacgttgccttgccggaactccacgacggtgaggccctcgtgcgagttcgtgcatgcggtatttgtggtagcgatgttgcccgagtcttcaccactggtacgtatcatttccccaccattattggccatgagttctcgggcgaagtcgttgaaacatattctgcggctgacgcggagtgggtgggtcgccgcgtgagcgtttttcccctcatcccttgtcgccattgtgatgcctgtcatcatggtcagtacgaaatgtgcacatgttacaactatctcggcagccgtaccgatggaggcttcgcagagtacgtggctgtcccggtctggaatctctttcgtctgccagattccgtgtcttacgaggagggcgcaatgatggaaccggccgctgtcgctatgcacgcgctcaagattgcccgtgtgggtatgggtgacactgtggcaattacaggtcccggaactattggtatgattttgacccaattgatccaacgtattggcggtacaaaagcggttctgatcggacgcacccaagcaaaattggattacgcacgacgcatcggcatccgtcatgtgtgcaattcgggaaccgagcacgtcgcggaccgcgttggacaacttacaggcggacgtggagccgacatcgcaattgaaggaaccggtgcgtcggaacccatgaatctgtgcttgaatttggtgcgctctgaaggacgtattgtcgctatgggaaacccccaaggtgacatgctgttccgaaaggatgcgtattggaagcttctgcgcaagcagctgacccttcgtggaacctggaattcgacatatggattgggccgagatgattggcaggatatttccgcccttcttgctgagggagcattgaacttgcgcggccttatcacacaccgactcccactggccgagctgcagcagggactcagcctcatgcgagacgcagcagtctacactaacaaagttatgatcgtcgacgagcaaggttaa

SEQ ID NO: 111 - DNA, 1014 bp, synthetic construct
  source 1..1014: mol_type = other DNA; strain = OM05-6
atgcgcgcctatgagcttcacggagtcaacgacttgcgtcgcgaggacatcgaaaaacctgagattccctctggatgggttcttgtgcaagtcaaagcgagcggcatttgcagctccgacatccctcgtatcttcacgaacggcacttatcactttcctaccattccgggccacgaattctctggagtcgtggccgcctatggcgaaggtgtcccggaagaacgcgttggcaaacgagtgggtatttttccgctgatcccgtgtcgtacatgtccccaatgccgccagaagaaatacgaaatgtgcgagcactatgattaccttggctcgcgtcgtgacggcggattcgccgaatacgttgcagtcccggactggaacctcctggaattgccggagaacgtttcgttccgcgaggcggcgatgctcgaacctctgtcggtggcacttcatgccgtgaaacgcagcggcgtgaaacctggtgatacagccgctgtgatcggcacaggaatgatcggttttgccgcagctgcttgggccaaagcactgggagcagaaacggtgttcgtgattggacgcggcgaggccaaacgcgctattgctgaacaaattcccggaatttcctatgtgactgaagaggaatccaaggccattcaggcggacgtggtcgtcgaagcagttggtacaccacaggctgtttcctccgcggtgttgcttgcacgaccgggaggttccattgttctgatgggcaacccatccggtgatcttgcgatggaaaaaaacgtctactggcgtatcctccgtaagcaacttaacttgatgggaacgtggaatagctcgtatgaaaaagacgaagcctgtgactggaccgaagcgctcgacgcattgtccaagaaaaagattcctgcccaagcacttatcactcattgttttcccagcgaaaaacttatggatggactggaattgatgaagaatcataaggaaccatactgtaaagttatggtcagctgggagtaa

SEQ ID NO: 112 - DNA, 1065 bp, synthetic construct
  source 1..1065: mol_type = other DNA; note = Candidatus Bathyarchaeota archaeon
atgaagcgtatgcgagctgccatcttgtatggaccaaaagacatccgaattgaaaacattgagatgcccaaggttaagccggagtgggtgcttattaaggttcgcgcaacaggtatctgcggttctgatctgcacttttacaaagagaagagctttattcctattattagcgacgtgggcaaaggacgctacgtccccggtcatgaattttcgggcgaggtctacgagttgggttcgaaggtcaaaggcctgaagaaaggagatcgcgtcggcgtcgaacccatcattggttgcggcaaatgtcagtggtgcaaggtcggatgttacaacttgtgtgagcactacaaattgattggctttcactatattggaggtatggctgagtattgtgttgctcctgctgagaattgttttaagctcccaaacaatgtttcgttcgaaagcgcggcaatgcttgactgtatcgccgtggctattcacgcagtgaataaagcagaaattcgcggcggtgacagcgttctcattgtcggcgccggtgccatcggactcttcgccctccaggcagcgctcatccagggagcgagcgacgtgtacgtcgttggaaaatacgaattccagttggagaaagctcgcaagttgggagcgacagctgtgattaacgctaaaaacgaatctttctccgaaaaaatcatggaaattacttcgggtaaaggagtcgataaggtcattgaggccgtcggcggagcctccaatgttatttctgacgtccttgacgtgactcgaaaaaagggtactatcgtgaccactggtatctttacacgaccactctcggtcgattttttcaaaattctcacaaaagagttgacgatcacttcgtcgtggggatactgttacttcgaccgtcgcaaggagtttggcacggcgctcgactttctggcaaaagaaaagatcaacactcaggaacttattacacataagtatcctttggagaaggtttccgaagcctttgagacggcactcaacaaaaataaggagaagagcatcaaggtggagattatcttctaa

SEQ ID NO: 113 - DNA, 1053 bp, synthetic construct
  source 1..1053: mol_type = other DNA; note = Lachnospiraceae bacterium
atgaaagcctgggtgctgcacggtatcggagatatccaatacgaggaagttaaggagccgcagtcggctggcgacgaggttattatgaaagtgatgagcgtgggaatctgtggatctgacatccctcgcatttataaaaccggcacctatcatttcccaacaatccccggccacgaattctccggtattgtggccgatgttggtgccggagtcaacccgaaatggaagaataagcgcgtcggcgtgtttccattgatcccatgtcacgtttgtgcttcgtgtaaaaaaggtcaatatgaaatgtgtcgcaactacggatatctgggtagccgccaaaatggtggttttgcagagtatgcggcggttcctgtcaagaatctcatcgaactcccggactctgtctctatgcaggaagctgccatgcttgagccgatggccgtggcagtccatgctatgcgacgagcccgtcccatgaccggagatcgtattgtcgtgtgcggacttggaactatcggcatgcttctcgtgtcctttttgcgagagacgggaattcgagacatctttgtcatcggcaataaggcattccagcgaatcaccatcctcaaaactggcctgcaggaaaactgttattgtgattctcgcgtgcaggatgtcgagaagtggctcatggagcgaactgaaggaaagggcgcagacgtgttctttgagtgtgttggccgaaacgaaaccatctcccaagcagtcaacctgacggcacccggaggttcggtctgtctggttggtaatccttgttcggatatgacgcttgagcgtgaggtctactggaaaattctccgtaaccagcttactattactggcacctggaattcctcgttcacccacgagatcgaggacgactggcattacgtgttggatcgcctggaacaaggtaagatctcgcctggtgatctcatttctcacaaattcccgctcaagaacttggaatctggtctgcatattatgcgtgataagactcaagattatatcaaaatcatggccgagattaatgtgtaa

SEQ ID NO: 114 - DNA, 1047 bp, synthetic construct
  source 1..1047: mol_type = other DNA
atgaaggccgcagtgctccattccgaaaatctgtttacgtacgaagaagtggaaatcgatccctgcaaagacgacgaggttaagatcaaggtgatggctgcgggtatctgtggttccgatacacataagatgacgagcaaatggaaatatccccttccgaccatcatgggccatgagttttcgggctttatcgtcgagattggtgaaaaggtcactaacgcgtcgattggcgatcgagttgtggcgatccctttcttgccgtgcaatgactgcgaatactgtaagcgtggacaattctcgttgtgcgaggatcacggcatggttggatccaaaagctttggtggtttcgcggagtacgtcaatatcaaaagcactaatgttcttccgattggtgacatggattttgaggaagcagccatgattgaacctctcgcagttgcgcttcacggcgtgttgaatattcatccgcgtattggagatattgcagccgtctttggtattggcacaatcggaatcctcacaatccaatggcttaaaattgcaggagtgaaagaggttattgcgatcgacatttccgataacaagctcgcagacgcccatgctatgggctgtgagcgtactatcaatccatttaaagagaacctccttgagaaaatcgacgaatatactaacggtcgcggtgttgacatcgcctttgagtgtgctggatctaaagtcacacaagaacagtgcctgctcgtgacagccaagcgaggaaaagtcggctatttgggtatcgcttactctgatgtccatttgtcggagcaagcttttgaaaacattttccgccgcgagctcacacttaaaggattttggaactcttactccgcaccattcccgggagaggaatggaccaaaagcattgacttcattaataagggtcgtattaaactgaaagagctgattagccaccgatttaagctccaagatactcagaaagcgtttgacatgatgatcaaccgagaagagacatacggcaaggtgcttattttgcccaacaaagagtaa

SEQ ID NO: 115 - DNA, 1047 bp, synthetic construct
  source 1..1047: mol_type = other DNA
atgaaggcggcggtgcttcattctgagaatcacttcatttatgaagaaattgatattgctccttgtcaagatgatgaggttaaaatcaaagtcattgcgactggaatttgtggatcggacacgcacaagatgacaggcaaatggaaatatcctctccccgccgtgatgggacacgagttctccggatatatcgttgagaaaggaaagaacgtcactaatgcagccatcggtgaccgcgtcgtggcgatccctttcctcccgtgtaacgactgtgagtattgtaaacgtggccaatttagcctttgcgaagaccacggtatggtcggctcgaagtccttcggaggttttgctgagtacgttaatattgagtcttcgaatgtccttcccatcggagatatggaatttgaagaggcggccatgattgagccgctcgcggtggcccttcatggagtcttgaatattcatccgcgtgttggcgacgtcgcggccgtgttcggtgtcggtaccattggtatgctgaccatccagtggctgaaaattgcgggtgccaaggagatcatcgcaatcgacttgtcggatgaaaaacttgctgacgcgcgtgctatgggttgtgaacgtacgatcaatcccctgaacgaagaccttcttgaaaaaatcaacgaatacaccaacggaatgggagttgacatcgccttcgagtgtgctggctcgaagattacacaagaacagtgccttcttatcacccgcaagcaaggcaaaattggatacctgggcattgcttattccgatgtccacctgtctgagaaggctttcgagaacatttttcgacgcgagcttacgttgaaaggtttctggaattcgtattccgctccatttccgggtgaagaatggacaaaatcgattgaattcattaaaaacggccgcattaagttgaaggaactgatctctcaccgatttaagctggaggatacacaaaaagcatttgatatgatgatcaaccgtgaagagaaatatggtaaggttttgattcttccgaacgaggagtaa

SEQ ID NO: 116 - DNA, 1053 bp, synthetic construct
  source 1..1053: mol_type = other DNA
atgaaggccgcggtcctgcactccgaaaatgagattatttaccaggacattgaaatttccgagtgtcaaccaaacgaagtgaaagttaaggtcatggcggctggaatctgtggttccgatacccataaaatggtgagcaaatggaaataccccctccctgcgatcatgggtcacgaatttgccggctacgtcgttgaaaaaggcaaagacgtgacgaacgtcgaaattggcgatcgtgttgccgctatcccgttcatcccatgcaacgagtgtgagtattgcctgcgaggtcagttcagcctttgcgaaaatcacggaatgatcggcagcaagtcctttggcgcatttgccgagtttgttaatattccagctaagaacgttctcccgattggcgaaatgtctttcgaagatgcagctatgatcgaaccgtctgcggtcagcctgcatggagtgctcaacattcacccacagctcggcgatgtcgttgctgtcttcggtgtgggaactattggaatcctcgcaattcagtggttgcgtgtcgccggcgtgaaagagattattgctattgacatttccgacaagaagctccaggacgctatggatctgggttgtgagaagtcgattaaccctttgaaggaagacttgattaagaaaatttatgaatacacgaatggcctcggcgttgacatcgcatttgaatgcgctggatctaaaattacgcaagaacagtgcctgctcattacccgtaaacaaggaaaggttggttatttgggaattgcgtacagcgatgttactctctctgaaaaagcctttgaaaatattttccgccgagagctcactctcaagggtttctggaattcgtattccgcgccgtttccaggaaaggagtggatgaacacgatcgagttcgtccaacagggcaaaattaagcttaaagaattggtgtcgcatcgctacaagctcgaagacacccagaaggcgtttaacatgatgatcaaccgagaagaagaatacaataaggtgatgatcatccccaacgaggaactggagtaa

SEQ ID NO: 117 - DNA, 1041 bp, synthetic construct
  source 1..1041: mol_type = other DNA
atgaaggcagcggtgcttcattcggtcggagacatccgctacgaaaacatcgagatcaagccttacggagacgatgaagtgaaaatcaaagttaaagccgccggtatctgtggatctgacccgccacgtgcactcaaaaagtggaaatatcccgtgccagccattttgggtcacgagttctcgggttatatcgttgaagtgggaaagaacgtgaagggttttaaagtgggagatcgtgtcgttgccgtccctctggaaccgtgtcaccaatgtgaatactgcaagaaaggccaattttcgctctgcgaaagctacgatatgttgggtgctacttcctttggcggttttgcagagtacgctaacgtgaaggcaacaaatgttttgaaaattgacgatatcgactatgaagaggcggccatgattgaacctctcgcagtcgcactgcatggtgtgcttaatatcaatccgcaactcggtgatactgttgctgttttgggagctggaacgatcggtcaactcacgattcaatggctcaaggtttcgggagtcgagaagattatcgcagtcgacatttcggacaaaaaaattagcgaagctatgtccttgggagcagatattggtattaatgctcttaaagagaatccggtcgaaaagatcatggaacttacaaacggtttcggcgtggatatctgcattgaatgcgccggctctaagatcactcaggaacaatgtctgttggtcacgaagaaaaaaggtaagattggatatcagggtatcggtcacgccggaattgagttgtctgaagttgctttcgagggtattttccgtaaagaattgaacatccaaggtttttggaatagctacagcgccccgttccccggacaggaatggttcaaaagcatcgagtatgttaagcagaaaaaaatcaagctcaaacagttgatcagccatcgcttcagccttgaagacacagcgaaagcttttgagatgattggtgaacgtaaggaggagtataacaagatcatgattgtccaggactaa

SEQ ID NO: 118 - DNA, 1047 bp, synthetic construct
  source 1..1047: mol_type = other DNA
atgaaagcagcagttttgcattccgagaatcacttcatttatcaggatatggagagcttcgagtgccagaatgacgaagtcaagatcaaggttatggctgccggcatctgcggaagcgatacgcataaaatggtttcgaaatggaaatatcccttgcctgcaattatgggacatgagttctccggttacgtcgtcgaaaagggtagcgatgtggcaaacgtcgagatcggcgaccgagtggttgccattccattcttgccctgtcacacttgtgagtattgcaagtccggtgtttattctttgtgtgaagatcacggtatgatcggttccaagagctacggtggcttcgcggagtatgtcaatctcaaggcaaccaacgtccttccaattggaaacatggattttgaggaggccgctatgatcgaaccgcttgcagtcgccctccacggcgttctccatattcagccgcgtctcggtgacgtggccgccgtttttggagtcggcaccattggcatgttggccatccaatggctgaagattgcgggagtgaaagaaattatcgctattgatatttcggatgagaagttggcggaagcgaaagccatgggatgcgaacgaacgattaatcccctccaagacaatctcatcgaaaaggtccacgagtataccaacggcttgggcgtggatgtcgccctcgagtgcgcgggatctaagattacacaggaacaatgtcttttgatcactcgcaaaaagggtgaaattggttacttgggaatcgcgtattctaatgtggttttgagcgaacaagcttttgagaacatctttcgtaaagagcttacgttgaagggtttttggaattgttatagcgctcccttccctggcgaggagtggacgaaatctatcgacttcattctgaagggccgcatcaagctgaaggagcttatcagccaccgctttcccctggaagaaacgcagaaggcattcgacctgatgattaatcgaaaagaaacctatggtaaggtgatgatcatccccaataaggaataa

SEQ ID NO: 119 - DNA, 1047 bp, synthetic construct
  source 1..1047: mol_type = other DNA
atgaaagcagcagtgctccattctgagaatcagatcgtgtttcaagaatttgagatcggcgaacttaagccagacgaagttaaggtcaaagtgatggcagcgggcatctgtggctcggatacccacaagatggtgtcgaagtggaagtatcccttgccagcaatcatgggtcatgagtttgccggctatattgtcgaaaagggaaaagatgtggtgcatgtggaagtcggtgatcgtgtggcaggcatcccttttgtgccttgtaatgactgtgagtactgttttcgcggtcagttttccctttgcgagaatcacggtatggtgggttctaagtctttcggagcctttgcggaatatgttaacattccagccaaaaacgtgctgccgattggagacatggattttgaggacgcggcgatgattgagccttcggccgttgccctccatggagtcttgaacattcacccccaaatcggtgatgttgtggcggtttttggagttggcaccattggaatccttgcactccagtggttgaaagttgccggtgttaaagaaattattgccattgacatctcggacaagaagctccaggatgccatcgccctcggatgtgagcgcacgattaatccattgaaagagaatttgctggaaaaaattcatgagtatacgaatggtcttggagtggacatcgccattgaatgtgcgggcagcaagattacacaagaacagtgtcttcttattacgcgcaagcagggcaaagtcggctatcttggcatcgcttactccgatattaatctgtcggaaaaagcatttgaaaacatcttccgccgcgaactcaaaattaatggtttctggaattcttattcggctccgttcccaggtaaagagtggacaaacaccgtggagtatgtgaagcaaggcaagattaagctgaaggagcttatttcccaccgattcggactggaagacacgcagcaagcatttaatatgattatcaaccgagaggaggaatataataaagttatgattgtcccaaacggcgagtaa

SEQ ID NO: 120 - DNA, 1026 bp, synthetic construct
  source 1..1026: mol_type = other DNA
atgattaatcaggtttaccagctggtggcgccgcgccagttcgacgtcacgtataataacgtggacatttacggcaaccacgttatcgtccgaccgctgtatctctcgatctgcgcggccgatcaacgatactataccggacgtcgtgatgagaatgtgctgcgaaaaaaattgccaatgtctctggtccatgaagccgttggtgaggttgtttttgatagcaagggagtgtttgagaagggcacaaaggttgttatggtcccaaatacgcctacggagcaacaccatattatcgccgagaactacctggcgtcttcgtatttccgctcgagcggttacgatggtttcatgcaggattatgttgttatggcgcatgaccgtattgtcccgctgcccaacgatattgacctgagcactatttcctatacagaattggtttcggttagctaccacgccattcaacgtttcgagcgtaagtccattccgctcaagaatagcttcggtatttggggagacggtaatttgggctacatcactgcaatccttcttcgcaagctctacccggaggcaaaaatttatgtcttcggaaaaacggattataaactttctcatttcagcttcgttgatgacatcttcacggtgaaccaaatccccgatgatttgaagattgaccacgccttcgagtgcgttggcggaaagggctcgcaagttgcgttgcagcaaatcgttgagcatatctcccctgaaggttctattgctctcttgggcgtgtccgaactccccgtcgaagttaacacccgactcgtgttggaaaagggcttgaccctgattggatcctctcgttccggttccaaggactttgagcaggttgtcgacctctatcgaaaatatcccgatattgtcgagaaactcgcacttttgaaaggccacgaaattaatgtttgtacacttcaggatatcgtgcaggcatttgaaatggacctctctacgtcttggggcaagacagttttgaagtggacgatctaa

SEQ ID NO: 121 - DNA, 1053 bp, synthetic construct
  source 1..1053: mol_type = other DNA; strain = 71193; sub_species = aureus
atgttgttgtttgaagttgttctcccaatgatcaaccaagtttatcaacttgtcgcaccccgccaatttgaggtgacgtacaataacgtggacatttacagcgactatgttattgtccgacctctttacatgagcatttgcgctgccgaccagcgatactacaccggatcgcgtgacgagaatgtcctttcccaaaaactgcctatgtctctcattcacgaaggagtgggtgaggttgttttcgattccaagggagtctttaataagggcactaaggtggttatggtccccaatacaccgaccgagaaagacgacgtgattgcagagaattatcttaaaagctcgtattttcgttcctccggccatgacggtttcatgcaggacttcgttctccttaatcacgatcgagctgtcccgctgccggacgacatcgatctctccatcatttcctacacagagttggtgacagtttctctccatgccatccgccgatttgaaaaaaaatccatcagcaataaaaacaccttcggcatttggggagacggaaatcttggttatattaccgcaattctcctgcgcaagctctacccagaatctaaaatttacgtgtttggtaaaactgattataaactgagccatttctccttcgtggacgacgttttcttcatcaataagattcctgaaggacttacctttgatcacgcctttgagtgcgtcggtggacgaggctctcaatccgcaattaaccaaatgattgactatatttcgcccgaaggtagcatcgccttgctcggtgtttccgagttcccggttgaggtcaatacgcgcctcgtcctcgagaagggactgaccttgatcggctcttctcgctctggttctaaagactttcaagacgtggttgacctctatattcaatacccggatattgtcgacaaattggcgctccttaaaggacaggagttcgaaattgccacaattaatgacctgacagaggcgtttgaggctgacctctccacctcctggggaaagacggttttgaagtggattatgtaa

SEQ ID NO: 122 - DNA, 1026 bp, synthetic construct
  source 1..1026: mol_type = other DNA
atgattaataccgtctaccaactggtggcacctcgacgattcgagattaagtattccgacattgatctcaacaataataaggttatcgtccgtcccacctacctctctatctgcaacgcagaccaacgatactaccaaggactccgcgatgccgaaattctgcgtaagaaacttccgatggcgttgatccatgaagccattggagaggtcgtgcgagatccatctggaaactttaaaaccggcgagttggtcgttatggtgccgaacacacctgttgaagaagatgacatcatcgctgagaattatttgcgatcctcgaaatttcgtgcatcgggttttgacggcttcatgcaagaatatgtggaaatcacaccggatcgcctcgttcgtcttccccagaatatcgaccgtactgttgcagcttttacggaaattgtttctgtcagcgtgcatgcaatcggtcgttttgacaagatcgcgcacaaacgacgaaacgttgtcggcatctggggagacggcaacctgggatatattactgcggttttttttaagactatgtttccagagacgaagctgtatatttttggagtcaacccagataaacttcaagattttacgtttgccgacgcgacgtttacggtggagcacattcctgaagacgttaagattgaccatgcttttgagtgcgtgggtggcgcaggctcgggcaaagccattaatcagattatcgactatatcaatcccgaaggtaccatttccattttgggcgtttctgaatacccagtgccaattaacacccgcatggtcctcgagaaaggactgcgcatctttggatcgagccgtagcggtgtcgccgattttgagaagaccgtcgcgctctacaaatccaatcctgagattatcaattatctttcgaatatcgtcggtgcagtcgtcccagtgcgaacgatcgaagatatgaaaaaggcgttcgaaatggacatccaaaaggcttttggtaagacgattatgatgtgggataaataa

SEQ ID NO: 123 - DNA, 1032 bp, synthetic construct
  source 1..1032: mol_type = other DNA; strain = D12
atgattaatcaagtctatcgtctcgtctctccacgccaattcgaggtcgcgtataacgatcgcagcctccagtatcacgaggactttgttgtggttcgacctacgcatctgagcatctgcgctgcggatcaacgatattacactggctcgcgtggaaaagaagctatggcaaaaaagcttcccatggctctgatccacgaggccattggtaaagtggtctacgaccccaagggtgagatcaaaaatggcactatggtggtcatgattccgaacacgcctactgaaaaggatgaagtcattggtgagaattatctccgatctagcaaattccgctcgtccggatatgatggattcatgcaagattacgtcttcatgggtcgcgaccgtattgtggaactcccggaaggaattgacccgtatgttgttgcttttaccgagttgatgaccatcacaacccatgtgttgagccgatttgaatctcgttcccataaacgacgtaacgtttttggcgtttggggagacggcaaccttggtttcatcacgacactcttcctgaagaagatgtataaagattgtaaagttatcatcttcggaaaaactggatataaactcgacaatttctctttcgttgatgaggtgtatacgattgacgaaatccctgaggacctgcgcatcgaccatgcctttgagtgcgttggaggtaagggttctcagtatgcaatcgaccaaatgattgaccatctccaccctgaaggttccattgctcttatgggtgttagcgaatttccagttgaagttaatactcgtatgatcctggaaaaaggaatcacactgatcggaagctctcgatccggtcgagaggacttcgtgcgcacggtcaactttctgaaggaaaatcccgatgttgttgaatacctgggtacccttgtgggcgaggtccaagaagtcaagacgatctccgatattttgtctgcatttgagaaagaccttacatcctcttggggtaaaaccgtcatggagtggaagatctaa

SEQ ID NO: 124 - DNA, 1026 bp, synthetic construct
  source 1..1026: mol_type = other DNA; strain = EGD-AQ4
atgctcaaccaagtgtatcgcctggtcgatccacgtcagattgaagttcaaactgttgcagaagagatcactgataatgacatcgtcgtccgccccaaatatctgtcggtctgtcatgcagacacgcgatactttacaggtcaacgtccccaagcaaccttgcgccagaagctcccaatggctttgatccatgaaggagttggcgaggttgttaaggaccctcaaaataaatttaagcccggtacgttggtcgctatggtccccaatacgccctttgaaaccgaccctatcattaaagaaaactacttgccaacgtctaaatttcgcagcagcggttacgatggtttcatgcaggaatacgttacacttcatcgtgatcgcgcgatcgtcgtgccagacaacttcgaccaccaaatgagcgcattcattgagatggtttccgtcggagtccacgccctcacccagctggaggccgtgatggatgcggatcgcaagatcatcggaatttggggagatggcaacttgggttttatcacagcaaccctcgtcaagcaaatctttccagactctcaactgatgatctttggacgacatcgctccaaattggactatttcagctttgcggacaagacatacctggtggacgacattcctagcgatcttcaagtttctcaggctctggaatgcaccggaggccgaggctcggagtctgctattgctcaaattatccaacacattcgaccaatgggcaccgctatccttatgggagtttccgaagatcccgttggtatcgatacacgcagcgtgttggcagagggattgacccttcgcggcgtgagccgtagcggtcgcgcggattttcagcgcgccatcgacattttgacgaaatcccccgtcacacgtgaacgtctgcaaaatcttgtgggtttcactcgaaaggtcagcacaatccaggatatcaccgatttcttcgagggtgcattgacaaactactggggcaaggccgttatggagtgggatgtttaa

SEQ ID NO: 125 - DNA, 1014 bp, synthetic construct
  source 1..1014: mol_type = other DNA; note = uncultured Ruminococcus sp.
atgatcaattacgtgtatcagctggtcagcccccacgtcttttccctcaaatatgaagaagtggacttcaagaaagaggtcatcatccgtccgaagtgtatggctgtgtgccacgcagaccagcgatattttctgggacgccgcgacgctaagatcctgcgacaaaaattgcctatggcccttatccacgaatgttgcggtcaggtggtctgggatggcacaggttccttccaacgaggccaaaaggtcgttctcattccaaatgtgccaggacgcgacgacggtgtcacatacgaaaactacgctgaaggatctcgttttcttagctcgggctgcgacggtttcatgcgcgagtatgtcaacctttccccagatcgtgtggttcccttcgaacaggttccgcttccggtggccgcgatcacagagttcgtgtccgtggcggttcacgcggccggtcgctttatgcgagcggcgcacacacgccgcgaggctatcggagtgtggggagatggctctctggcttatgtcgtctgctgcgttcttcgtcgactgctcccggagtcgcgtatttttgtggtgggtaagcatgaacgcaagttgctccagttctcgtttgccgatcgcaccttcctttttgatagcctcccggaggacttccatattgaccacgcgttcgaatgcactggaggagagggctcttactatgctatcgatgatattattaccgcggtgcgtccccaaggcgctgttatgcttatgggtgtctctgaaaaccgcgttccagttcgcacccgtgacattctggaaaaaggcttgacgttcaccggttgttctcgttctggacgcgaagactttgttaaggcagtcgagcttatggagcaaccccaattccaaaaacgccttagcgcaattatttacgaggatcgtccggtccatactgtcgccgatctgtcccgtgttttcgagacggatttgaatacgccgttcaagacagttttccgttgggagatttaa

SEQ ID NO: 126 - DNA, 1017 bp, synthetic construct
  source 1..1017: mol_type = other DNA
atgattaacacggtgtatcgccttatcgccccaaagtccattcgagctgactttgtggatctgaaattggatgaagaacgcattatcatccgccctacatatttgtcgatctgtgcagcagatcaacgttattacaccggatcccgtggtcgcgtcgtgatgaagcaaaaacttccaatggcacttatccatgaggctgtcggagaggttgtttatgaccccaaaggtgagctcccagtgggaacgcacgttgtcatgattcctaatactcccaatgagaaagatgatattattaaagaaaattacctgcgtagctcccagttccgtgcgtccggatttgacggcttcatgcagaatgtcgtgtctatgcgtcgagatcttgtcatcccatttgattacgagccggaagtcggtgtgctgcttgaactcatgagcgtcggaatgaatgcggtgagcactttcaaaaaacatgcccatgaccgcaaagacgctattggaatctggggaaatggcaacgtgggctttgtcactgcactcattctgcgaaaagagtttcctgatgccaagatttatgtttttggtgtggaagagcataaaaatcgatacttttcttttgctgatgatacatttatcatcaatgatattcccgaggacttgcaattggaccacgcctttgagtgcgtcggaggccgaggctctgaagcggccatttctcagatcattgactacatcaaaccgcaaggaacaatcaatttgatgggcgtgagcgagaatccagttcccattaatacacgaatggtcctggagaaaggcctccaacttctcggaaattcccgaagcaactacgatgattttaaaaagtctgttgacatgatggcgaacaacaaagacgttcgtgaatacctttccactattgtctctgagatggttgtggtgaacacaattgatgatatgatccgcgctttcgaagatgatacttacaatgatttcaagaccgtcatgaagtgggaaatttaa

SEQ ID NO: 127 - DNA, 1026 bp, synthetic construct
  source 1..1026: mol_type = other DNA
atgcttaaccaagtttatcgactcgtttctccccgtcagttcgaggtggagacagtcgcagaagaagttgatgcggatgacttgatcgtgcgtcccaagtttctcagcatttgccacgcggacactcgatacttttttggacagcgctcgcaagccgcactccgagccaaacttccgatggctttgattcacgaggccgtcggtgaagtcgtttacgatccccgtaatgaatacaagcccggaaccttggtcgcaatggtgcctaacaccccggtcaagaaggatagcatcattcaagaaaattacctgcccagctcccgtttccgatctagcggttatgatggcttcatgcaagaatacgtgtgtctgcgacgtgatcgagctattactgttccttccgactttgacccgcatatggcggcgttcattgagatggtttccgttggagtgcaggcacttactaagttggaatccacaatggatgaggatcaacgcgttattggcatttggggtgacggaaatctcggttacatcaccgccaccctcgttaagcaaatctttccagactctcagctcctcgtcttcggacgccatcagtctaaactggattatttctcgtttgcagataagacgtatctggtggacgatatcccggccgacgtcaaagtttcgcaggccctcgaatgtacgggcggtcagggctccgaagccgcgatccaacagatcatccaacacattcaaccgatgggtacggcaattctcatgggtgtttctgagaatcccgtcggaatcgacactcgttcggttcttgctgaaggtctgactctccgaggagtgtcccgtagctcgcgcgaggattttaagcgtgcggttgacatcctgtcctcttcgccagttacgcgtgaacgattgcagaatctcgtcggctatgttcagaaggttagctccatccaagacattaccaacttctttgatagcgccctcactaattactggggcaaggaggtgatggagtgggacgtgtaa

SEQ ID NO: 128 - DNA, 1029 bp, synthetic construct
  source 1..1029: mol_type = other DNA; note = Lachnospiraceae bacterium
atgattaatacactgtacaaacttacggccccactgattgtggaatccttttatgaaaatatcgactgtcattccgacaatattattgtgcgccccgaaaaactttctatctgcaaggctgacatccgatactacttcggaatgcgtaatgctaaagtgcttaaagagaagttgcccctcgcactcattcatgaggcatgtggctctgttgtctatgacatcaccggcaagtttaaggctggtgaccaggtcgttatgcttcctaatattccgggtattaacatgcagtatcatgagaattatcgtcgtgatagccttttccgcagctctggagcagacggattcatgcaggagttggtgtcgatccctcagtcgcaagtcatcaaatttgagaagatggatcaaaacattgccgcgttcacggagttcatctctgtcgctattcatgcagtcagctcgtatcttgatcgcagcgcgggaaagcgaaatggtatcaagcgtaaaatcggtgtgtggggtagcggcgcaatgggctacgcggtgtcgtgtgtcttgaagtacttcattccatctgcagagatcactgtcattggaggtagcaaagcaaagctggacatgttttcctttgtcaatcatacttgttccctgagcgagcttcctgacgatgcagagttcgatgattgcttcgaatgtgtcggtggagcccaatctggcaatgcaatcaatcaaattatcgatcatattctgccggaaggcctcctgctgttgttgggcgttagcgaagaggccgtgcctgtcaacactcgaatggtgctcgaaaaaggcatcactttgttgggtcgatcgcgctctgagcgttcggactttatcaaaacaatcgacatccttgatacgaacgagaatattcgacgccgcatttctaacttgatctctggcgaggtggagattaacgaggtgaacgacatccacaaggcttttaatcagtccaaaattgcagactataaaatcatcttgaattggcgtatttaa

SEQ ID NO: 129 - skipped

SEQ ID NO: 130 - DNA, 1002 bp, Moniliella pollinis
  source 1..1002: mol_type = other DNA
aacacgtagaacacagggatcgccatttgtccgaaatgcaatctttgctctcgaagcttgaagcttgaatagcttgaagcatgagtgcatgaggggctgctatgatcttccaaccaaacttgcttgggcattgcactttggctggatagctatcatttagctgacccccaaagagactgccaatgatatgatatttgtgtaggtgcacgagtggatgagtggcgcgactacctgtcacaagatagatgctcgatgcacttcatgtgaagtggctagtggatgtccggagactggagtacagtaaagagtttggagttgggaacagcgcgaatgaaagaggctcagagagaggtaggtttgatgtgacgtcaagcgggctagtcagttagcaagggagtatggaatgcagcgcgcaacgcgcagcgcggagcccagtgcgcctgcgctcaggtactcatactcagtactcagtactcaggcgccatgccggagcttacatgcaatcaattaaccctgacgtctggcgcggcctgacgcctgaggcctgaggcctgacgcggccaagctccaagcgcaaccccaggctggcttgcgctggcgggcgcgagacgcagcagggggcaagtgtcgcagagtcgccgatcggatctgtggaacagcacaggaggcccgtgcggtcggctgcgcagtgcggtggagaagctggaagctggaagctggaaggtggaacctggaacttggaacttggaaaggaagaagagcgggaaggcgatgcacgatgcacgatgcacgatggggttggattgcgtacgagtagccgcacagcgcacagcgcacaacactcaccccatgcccccacgccccagcccgtgctcgggccatgagctgctggcaaccccccgaggcagccggcctttaactcaagtagcattcgccgccggtcggttcttcttagcctcccaccaccaccacttgcccgtgcttggacgctaattacaataa

SEQ ID NO: 131 - DNA, 679 bp, synthetic construct
  source 1..679: mol_type = other DNA
agctcagaccttgcatgttagccttgaccttgcctctatgaccactaattcgcacaagattgcacgttaccattgtcatcttgccatgtatccaatgtttcctgtttgccatagtacgtagtagatacatcgatcatcgatgcagatgacgcagatggcattggttcgctttgccctatgcatccatcatgcatcatgcatcatgcatcatgcgtcactatccatattaatcattgccctctgtactaggccatgacacctgcagacccttccccagggatgcttcttgtaatagccaatatactacacaactttaccgattacgatcgagatcgatctcactatagtttgtcgaacttcgatgcacatcgagggtgcggaaaaaagctgacggaagcggaagtgggtgaattggttaatttagttagattggcagggttgttcccaagattcaacgcaagctgagaaagaaaacagaaacacgaggcataaggccagtcagaaaatgcattacgaggggagttgaagtgactgtgggccagtgcctgggtcgtcatgtgcaaattttttcttcggttagactgccgcagcatgcagcaactctgccggccctatataactagtgcttcatcttcttgtcattcttgtctctttaccaacacaccggtactctttcacc

SEQ ID NO: 132 - DNA, 1002 bp, Moniliella pollinis
  source 1..1002: mol_type = other DNA
catcgttccagcttgccttgggtgctagccagcgcaaaagtccgacgaacagacgaattgaccgtagtcgatgacagtcgatgacagtcgatgacagtcgatgacagccgacgaccgacgaacaacaaccaaccgcacgcagcatgaggccgagaggctcaggctgagccgctaaggcgctgaagcttgaagctcggtggtccagtcagatctcatgatctcacaccgccgcgctgctgcggtcgtatggttcaatttgctgtgcctagcctagcctgggtacgtcggtaactagccactagccactggccattatttggctactgggcacactaggaggcgcactagtccatcgcaagcggtaacttacctaccggccactacctgatgatttccctcttgcctggcggcctggcggcctggcggcgcactctttgcgctcggacccgcaaattgcaaaccaacaaacgactagtgtccggtacgtgtgcccaagtaacctgggcagacatagaaccacattgatcgtagggaaccgcaatggaccagtacgctattctcagtacattctgtacacttttgcctagattggaatctggtgaggatcaagatcaaatttcaaaccaactccacggcactggttcccgacacttggactgtagtactgaggtactgaggtactgaggtactgaggctcaactgagtctcaactgaccgtgaccgcgcttgtgtggtggcgtggattctagtgttggatgtgcgcagtggtgtgtgcggtggtgcgttcagattcgtcggtagaacttgactattcacgtcttgtgctgcgctgacgcttggaacctggaatgttaaaccttgggtcctgagggtctccaccccccaagtcgactgggttctatataaagtcgggtaggcaattggctagggagaatctctcttttctctttccccagaacacctgttcactcacttctcacctctttacttacctacttcaca

SEQ ID NO: 133 - DNA, 1000 bp, Moniliella pollinis
  source 1..1000: mol_type = other DNA
cctcgttcttgattgctttcaaaagtaatttaaggagagaacctggtcgtttgttgctctactgaatgatcttacctataccagcatacgacaccttgctgcccctccccttcaccaccaccatcaccactttcctctttttctttgggtttttctagtcgttgcatttatggttgattcgctctttgagaaccgtatggctgttattccttcccaactcttttgtctgttttatcgttgcatccaaacgtttgggctcttcgtacctcttttttctctgtttgccttttatttttggtttttctatccgtttgatggttgtgactcttgttttcctttgggaaggtttgagctcaacttctcttcggtccttgttggagtttgacttccttttctttttcagctgtggccgatcattacgatcaataatttgtgaatatgatatcgactacatcctgaatcttttagcgaaccatagcagtttagcgtcatagatatgcatgcatgatgtacatcttacacgcaccacggatgatgctcagcgctcagccacgcagccgctcagccgctcgctcggtacgctcggtcatgatgtgcatgatgcaagcctaatgattgacgggtacttgatctgtgtcccaattcgatcgagatcgatctcactatagtttgtcgaacttcgatgcacatcgagggtgcggaaaaaagctgacggcagcggaagtgggtgaattggttaatttagttagattggcagggttgttcccaagattcaacgcaagctgagaaagaaaacagaaacacgaggcataaggccagtcagaaaatgcattacgaggggagttgaagtgactgtgggccagtgcctgggtcgtcatgtgcaaattttttcttcggttagactgccgcagcatgcagcaaccctgccggccctatataactagtgcttcatcttcttgtcattcttgtctctttaccaacacaccggtactctttcacc

SEQ ID NO: 134 - DNA, 1007 bp, Moniliella pollinis
  source 1..1007: mol_type = other DNA
cttgacgggttcaatattcaatactcagtgttcaagcagtggtaggttgctccgtggatggaacgacgggtttaatttcttccgccatgcaccatggtccatgatcggttcagatggacagttggtatgagaaagtggtaacagataaatagaatttcgtacaagttggcaagagcctggccgatggtccatggctcgatggctcgatggctcgatggctcgatggccacacaccatgtcatctactttctgtgcttctatgcggacgagtcggaacagctgtcaaactgcgtttggggtatttgagcggaatttgaaaccttgttgaaactacattgtctcctcgttacttctctggcatctgtttgatcgaacggcgtcatgcaatagacacgcgatgaggcccaacgacggtgacgttgaacgcctggcccacctgctacaacaccgtagaacgtgttgaagttgaacgtcggacgttggacgttgagttgacgcgtgatgctggaaccgtggatgtagcagcgacagacaagccctctaagcaatctagtcgattttcaaaccaactaaacgagccttagttcggacaaccctagtccagtgcgggggcagcgtggggtcagttgccagcgaaggtcaccccagctagctgggttggctagcttgactggctcagaagtatcgatgctggagcttcaggccagtacgaaaatacactgtcgtagtgctccttccggagttctgggcttctgagcccggcggttgtgcatcggtgcacagtgcacggaccggcgggtgggacaacaaactgtctgggcgtgaaatcgtgcgagtgttgatgcaaaccggacgtacccagcacgcagttcccagtactcagacatactcagtacctcagtggttgagcctcagcatcgcctccgtatttctacaaagctgttgagtcgccttttgactttttactaccaccatcccctcttcttctaaaccccttacattccaaa

SEQ ID NO: 135 - DNA, 1000 bp, Moniliella pollinis
  source 1..1000: mol_type = other DNA
tcgacgacagtgagtatagtcaactatgctatctagtagccaaagtaagtctacattccgggctttgcaggggttagctatttcattagacaatacttacaaccttcgaagggcttccccagaattcaattctatattgattcaatatccacccatcggacccgctctccgtaccccctgttcgcttcgccactacaaccatgtcaagacctgagaatcgtagcaaattgccccactacggcccgagtgctgtcggctggttaaagtagaatgacttgggtagccagatcgagacgcctgacattgatacgcagacagcgcagtcagtttcaaactgacaactgacgcgtactggattgacaggactccttggccggtgccattcgaatcgcttgtagacctcttgccagcatcttgccagagaagcttgaaggctggatcgctcagcctgagctcacacttagtagctccactagtcactcaggtgctcagcctctcctcagcgcctcaagctcaagcctcagggcctcagctgcatcgagctctggtgccagtgccagtgccagtgccagtgccagtgccagtgccagtgccagtgaagagagtggtatgagccaagctatacccaaaagcaaatgatggttattgccagcttccatgcacccctggggcgaaggacaacgaacaacagacagagtttgaattattcactggcctagtactaccaatttaaatttggtggttcagcgcaggaacggcgcgagtgagcgtaagggcaaactccgcatggggcgtgacgtcagtgtccctctggctgaggcactccagcaggctctggtcaacgcatcaacgtgtgtgtgtgtctaccaagcacattgtgcgctcgctgtccgtgcgccgaaatcgcaccagtcagaacgtctataaaacccctcttgcttggagggttaccgggccgtcttttcccaacgctccggctcactcactactctacacaaca

SEQ ID NO: 136 - DNA, 997 bp, Moniliella pollinis
  source 1..997: mol_type = other DNA
tcggaccccaagctctctagcttcaagctttcaagctagcttccagccagggtcatggaaccgtaggagctgggaaacgtgacgttgtcgctatgcctatcccatataagaattaacgtcgaatcatgaggcgcatgggaggctgcattggtggtatgatacataacgttatgattctatatgagcgatggagcgcggccgtctgccgctagtgtggaagttcgatacgcccagtccatttcgttcagatgacgtttggtccagaagtacggtacataccgagcgcaaacgtcgaacttatggccttggtcgctcgtggtccggcgtcgtcgacactttcatcaacggacgaaaggtagagccgaacgccagcggccaatggcgatggcgatagtagaatgaatagtcgtcagatctaggtcttaggctacaggccaccctgcctgaggcctgggggtcttacagcgagtctaaaaaacgaaaagccaacgtgccaacttgggcctgcccatgcaccctgccagagagccccaagctggtctgatgcaagcggagcaaaatgttggaagaatagtttcaacgatggtttggttccagtacgcacagtcgagagatgaggtactgcgcaacgagttgttggcgacggaaccgaagatggattgaactatttgatctacaggtgatggcgtggagtcgggcgtggggccgctgtgtgatatgtagaagtggcgctattcgagggctgcgcccgtctggatggatgcagaatgaagcttgcaggccgcagctggcaggatgggcgcagaacccggtgaaacatagttaaagcgcggggccagtgtcatatttcgcttgagccattctactcgttggcagcccaggcgccgctaatttacgccaactcttggtactcgagagctcgggcaatgtggtatataagcttgaggttccctacagcaaagcctggcttcttcaccacaaccgcactctagcaaac

SEQ ID NO: 137 - DNA, 1002 bp, Moniliella pollinis
  source 1..1002: mol_type = other DNA
gagcgtagagagctccatcgatggcctggttacaagttgcctgaagaccaccaatacggcccgcacgccaacggcaggccaagaaaggataattgacaaccgtgaatctgaaagcttcggcgctcaggagctcatgtgttttgttgtagatataaaggtttctgaataccagttgggtattgacacggggagttggactgaatctctcagatctcccagatctcaagtactgagtcccaagcgtgccataattaactctaggttgcgcgggacacgccacctgagatcagggtgtacgcgcatactaatccattccaccaccaaagcaagactgagggtaccgcctgaggttctggctattccaacagtcacaagtcaccgcgattgccgtcaaattccaaagcgtagtaggcgctcgacggagggatgatggccagtacccaatttcgagcactcagttagatctgttcgtgtttagttgctcctgcagatctatcttaaatgtatactgtgccaggtaggatctctcggcacctatagatgatataaaagatatgatgatatgccaagtgccaagccgtcaaactgacaaaatgaaagaaacagcaggcaagctaggcaagcgtctatcgggggattaaacggatgagtcagcagcacaggagcagtcagtcgacaattccggctttttcccgcccgcaaggccccagaccccagaccccagccgccaccatgtccgtatccgccggggttagcatgaccacggcagatttctccgctcagcttgctcggacgactatatataaagaatcctttcctcgcagtccgtccgagcccttcctccaccccatcggttaccaccaacgacatcacttggtcttgacgccgcgctgcgttttcccgcttccgcgtctccctagtgatttagctggtgttttcctctacccgccactctactgtttcatcgcttgttgccaagttttctcagttcattctcatcaa

SEQ ID NO: 138 - DNA, 1002 bp, Moniliella pollinis
  source 1..1002: mol_type = other DNA
tggacgtggacaagcaccctgaagtcgctcagggcttccagatcaaggctttgcctaccgtctacggcttgtatgagggcaagcctgttcgtcagtgtaagttttaaaatatattgttcttgtctgttcgggttttacatcagtggtgtactgacacggctttttgttttattgctgcagtccaaggtgtacttcctgaggatatcctgcgccaatttgtccaagatcttcccagcttggccgcccaagatgcccagaacccgcctgctgaaagtagcgaggctgccaactaagtatagtccatcctatgagctgtcctaccccaaacaactttttcacgcccaacgtccaaacgtcacttcttattgcggcaaagaacagctgcttccccactcattcattacccctttctgatccacgaggtgtacccatggcctttgtacattccatgaaacaggtatccttttccccaccattacatctgaacttacaaagactttgcttcctcttgtacacagctcgtcgtccatcgtccatcatcgatgacgatcatcctgcattcggtatcatgcaccatcatgcagcgatggcaacgagggccatgcaccatgctgcatatactatgtgtatagccaatagccaatcttcaatctccaacttcctacagacacagcctgtggggaatcgcttaatcgctgtccatgcgtccatgctccgcgttcctcgcgctcgtcgcggcctcgcgacgattaagtcacagtcacgcccacacagcgcgcgagcgcacgagccaccatcatcacgtgatgagacaaagagtccacttccgtaaaagcaatcttaataatacatgtaaccctagcaatgtagccctaataatttgtttggcctttattttattgcgcccccgcagcttttgcaccccggagagtaaaagtattccggttgctcgtcagagcatccctttctttctccatcagcaaagcgtgcgaccgccaagaa

SEQ ID NO: 139 - DNA, 921 bp, synthetic construct
  source 1..921: mol_type = other DNA
tttggatgaggcattcaatgtctccatgtttgaagaccagagaaagtgtaggtaacacaatagccatggacaattagcgaatccgaatatgtgtactaacattgtgcctccaactgacagctggtcgaataatgattgaaatcatcaaacatatcagagatatatcccagaaccatttaacaactgttattgtatgtatgcattactgttttacattgtgtctttccaaatactaacattgccattatccaatccatacatatatatatatatagattacacaacgcaaacctcgacagtcgattggtttacatcgtgtaagcagccttttacggaatatgatggacaaccagatcctcatagatggagacaatgtgcagatagattccatttatgatgacattgatgtgtttttaaatgcaaaataatctcctatataagtgagttccgagtctccccatgcttatcttatcgtgttttttctgtaaattaggtcaaagtattcaaacaattccctcaatctttcccattttttgctgagcccccatatcatcaaattaacgtatcaaatttcctaattagtagccccgtatgttaaattagacatgtgtgactgccatcccggacagcctacccaatgacacccgcgcaccgcacatattgtgtttagtgcgcgccgtctgctgaagcgactccctgtttgggaggaaccgagggcgggttgcccgatcccttgcccctcgctcctcctcctgggctcccccttgcagagggacaccgaggggatccctcgtgtgagagcttggaggtggatggtggtcaattttctcatttgattgaaagatttgttatattgaaaattcagtttgtggaagttgtgattaaaaggttttactgtttgttctgtagacacattcaata

SEQ ID NO: 140 - DNA, 500 bp, Moniliella pollinis
  source 1..500: mol_type = other DNA
acggatcaacaaaaatgtgcgccagctttgttgtgtgcccttttcctctagcggatcctatccacatttcgtgaatgaaccgattaagctctgacgagatttccttgttttctgtagatacctcttgtagaggtgtcaaagttatgttgtgatcgagagagttacctgcaaggtattatgcaagcggcttgatgaggacactcaactacgtgtgagtaggagtgcgttgctcagcagttgacgcgtgagccgcttgagcagcttgataaaggtcctaatcgtcttccagctgttggcagacgacaatgtgctgtagtagtaggataggcccgtaaaagtgtagaagcaataggttgagactgactgtaatgggtacttgcgttcaaagactgaaagtccaaaggattgctcaaaggcccctgaggtctgagcctctgagcgcgctcttcgtcaaaattcgccggggccatcggtcatcctctcgagggcagcatcttcct

SEQ ID NO: 141 - DNA, 500 bp, Moniliella pollinis
  source 1..500: mol_type = other DNA
gtactaaccaagtctattgtaaagctggtgtctgctgctgcttcagcaagtgccattgctaccatcgcaagcaaattgcaaaaaaattcgttcaatggtctaatttaagtaaaatactcataatttataaaatgccgcttgtccttaccttttgtctttctccttattatagtagctgtagttatcgtagtcctcaggacttcgtcaacgctcgttgatgatcatatatacttcacctcattcattcataaagcattcattaggattgtatgatccggcagtgcatcatgcatcatgcatcatgcatcaggacatcatgcatcatgccgtatcggtcgatcattgcatttgattggataatacgatcgtgtttaggcattggcagtcgaaacgaggataaagaagaggtcagtaccagtgcacagcacgcgctcgcgctctatgcgcactttgacgcttgaaaaaaacttttcagccaatcggatatagacagcggaccc

SEQ ID NO: 142 - DNA, 493 bp, Moniliella pollinis
  source 1..493: mol_type = other DNA
atggtctgagccgcccacgattccttccttcatgagcgtatgacgacccttttacttagcatgtgcctctaaagaatacgttttgcatacccacatattcgtaaccctgtcctctatagcttctacaggtcatagtcactggctgccagtataaacgtgtcaatatctaatcctcataagatgcctcgctctgtcgtccacaataaaattcagtaacgcaaggactgcgcgactgagtgattgccgatgatatgagaaaactaatttcaagccatttgaacttcaataaatgcttccgctaacatcacggatcatcgatcatcaaccagcctccattaataggcctgccaccactcgcgcaatcatgaatctgatcatacctggctagcgattctcataacaccagaattacctgcccattaaagaaaccctattctgcctgtaacccggcaccagccggtccgaattcacgacagactaaggctctcgcgca

SEQ ID NO: 143 - DNA, 500 bp, Moniliella pollinis
  source 1..500: mol_type = other DNA
atcagttggaatcatcaaccttttttttttgtatcgatttcttcctaccctcacctcccttttcccccttaactcctcgctttgaacctccttacccgagtgcctacctttacctttttctttttctctctcccctgcctaatattctaggcttgctactatactgctctctctaacacgatttttgcgcttgtaagcatttttctctttttaaatctaggttttatcatttgttgcatttatccaagtttttttttttttttgtttgtagtggttttactgtttttgtgttttgtagcttgactaggttcttattctattgtagatgtatatgatcggatgcattcccgatctaaaaggaaaatgttctcgactgatatttatttttaccttattgtcttcctaaatggtttgactcttgccttcttccttgggacgctttgcaacgttttgtacgtacgtaagggttcatcgtttggataagcgacacagttgtcaag

SEQ ID NO: 144 - DNA, 324 bp, Moniliella pollinis
  source 1..324: mol_type = other DNA
attcaccctggagtaactgcgcttcatcgtttctttgttacgacaataataccacgctgcatgctttgaattgagtatatattttgatgactggttcaaatagatctttcctccatagccttcgagtactcgtgatctcagcattatcagatttgtgtccaggcccccgaggacgatgcggttttcctggagtcactagttgggaagatttgtactggttgggtgtaggtagagagaaccattgattttggtgtagctgttcgttttataaggccgagattacgtaatgcacatgctgccctagcaaatcgcgtcgcgtcacgc

SEQ ID NO: 145 - DNA, 496 bp, Moniliella pollinis
  source 1..496: mol_type = other DNA
atgtgcttagattaacatacacttgacttccttacgcgttgatatatacttggatctccataacttctattgtatagtttaatcaatggactccatgttgacatcccattatgcgatctatagtagctggaaatagcaaaattgaagttcggcagacgactgcaccaggaggggtagattctgtcccataactccctaccacaggccgtgctctggttcgatttaccttagcctgatgcgctcaatgtaacgcgtaattctgagtggggttcggtcgtccaaggtttcagtatgcgctgtgcagatagtactgtatcgtgaaactcgaccgttgcacatgcactttatcaagtgtcgtaggcccagagtcgtaggccaagagtcgtaggccaagatggaaggcctgaagaaaaagaaagctttgatcgttctgatctatgcaatggattcatgagctaagtattagctatacaaatgattcgagcatagcagaagg

SEQ ID NO: 146 - DNA, 500 bp, Moniliella pollinis
  source 1..500: mol_type = other DNA
gttgctccctttgctgttctatgatccaaaagatgcttagtgctccactctctactcccgactaccttttacgcattctgacatgactagtagtgcaatgttacccctggtgttttctcgcaatcactttctgtctgctatagcttttgatcgtcagtagttttttggtatagctaaagtagacttttgtacctggcgttcaatgtaattttactccttttttgtgcgatgcaacagatggtgtaaagatcgtcgttaaagttttggcttgatgcttgattcggtgacggttgcttgggtgatccttatatcgtctcctggtgttctcataagcccaggctcttcttagctatgtacaacaggtccaccactgactatgttatgtagaggcatgcatttaacttacggaaagatttaatggagaagaacgtacctagtcagatgcttgacatgaaaacgtattcctgcaattcacaaatcagtatcctgcctgtccactc

SEQ ID NO: 147 - DNA, 500 bp, Moniliella pollinis
  source 1..500: mol_type = other DNA
gcggttcgcacttttatcccaggcatgaaaaatgacgcacggctgtcgcacgctacacccagtagtcgccttttcaggcagtctatgaggggagcttttcattgcccaaaattactagcctgcaattcatgatatcaggttcactttctcccgatgtctatagatttctcatagcgctttgaaaagacaatttagctactcagtttataagcaaatgatgtggaggtatttattaggtacaagatacgataacgtttacacgcggggaagcaagtggcaaatcgtcgacaacaccgcatggtggtggtggaatcgtactccatcaaagcttgcttgtcactttgggaggcaccaggttgaggccatcgcccgaaggtggttgtggccagggtttcgatatttcatgaatcaacgtgttgatggtattggattgggtaagaggtcgatccggctgttggtcagagtgctcatcacattcgtcgttgtcaagcccgagttgc

SEQ ID NO: 148 - DNA, 500 bp, Moniliella pollinis
  source 1..500: mol_type = other DNA
gtggcgttgattcgtatcttattattgatctgtcctgttccccacgttgccaagtgattgttcatgctatcctctctccattctgtttgtgttgcacagtcggtagttgtacgtagtagctcgtcacaaaatatgaagtgagccttgcaatgtaggcattcacaagctgctaggcaggctatgatctaagctaagtggcaaaaattctcttgattcaatgccaaactatactattgttcctcaggcaaaagcagctatataagttgcattcaacgcaaccgccatacaagcaaattagagagaaacgggatataaggtgctttatccctgaaggagtagccagcgtctacttggttgctacacaatacagcaaacagtgtacttaatgagccattggctgaactggagctcgcagaggttcgagaagggcgggtcataccagctgccctccatggaagctggggtgtcgatgatgaaaagtgtcggaacgtacgctagta

SEQ ID NO: 149 - DNA, 500 bp, Moniliella pollinis
  source 1..500: mol_type = other DNA
acgaagggtttcccatctgtgtgacctgatccctttttacgtttttttgttttgttttttcttttgttcatgatcaacttgggagtgattcctcttggtgatgtcgaaaattgaactgttataccaatattctgttgcctttgtttcctgtttgtagtttactactttttacagtagtcgttgttcctgccttgcttgcgtttgtcagggtttccctttagcttagtaccaatatctagccttaattttgcttattctttctcaccgcccatgattgatttcaatcatgattaatgatttatgcatgaaaactcaaaatactcaattgtcttgtacaaggcaatcacaagctggtcagccattctcagcgcctataagagctttcagccaggccggccccaaaacgatctaccctgtggacctggctaggctaaactttggaaagtcatgcaattatgaacgtttgaagctcaagcgctcctaccctctcctggagcagt

SEQ ID NO: 150 - DNA, 500 bp, Moniliella pollinis
  source 1..500: mol_type = other DNA
tggtgttcaccactgttgcttcccctttgttggagcgtccgtcgttctgatggcgctctgagcccaaaatatcccttcttcgcccgagagcaagcctcggagtgtgcttgcaatctacttttcctactaaagttatcttcttgtggcttctgaatttgaatagaacgtgttcagacttgttagctaaatttgttgatgcgagatacttgacagaatcccgttgatgaactcatctgtgtgaccaccgcctggtgatggaatctcgcgcggaagccgtggtgttactgactctcaagcaattcagtagataaatttgtataacatcattgcaaggggtgctagcaatcaattgtccaataccaaacggcggcaagtgcaaaggggcgatagagagtttctgcgaggaagggaaggaatccgtatgcctgaaaacttttgtacaagtgtctttgtaagggcgaggtctgctctgacatctctctgagatctgagatctgata

SEQ ID NO: 151 - DNA, 500 bp, Moniliella pollinis
  source 1..500: mol_type = other DNA
gtttcttggctgttgacgaaatcttatgaaatgcacgggtctaatatttcctgccaattgtgtacccatctcgtttgtgaatgtcatagctagctctgtagtttctaaacgaccgtcttaggccggggtttgctgattggggattaaggataggatacttggccagtttgggccgatcaatatcaatctgctaggcgttccttaggtcaacttgaattatgatatatgaggtatgaggaaagtgggctaaatctgtggattaggatcagaaaaaacgtggcagaccctcgatctaggcctacgtcagcaatttcagcaatttcagcgccttgccccttagataggtttcagccgctcagcgcgcgcaatttcagcatggatgagatcaaaccaaggggcagcagttggcgaccctgtagttccaatcgcatgcttagtgcataacgcgcacatcaacgtgtcagattctcagagatctcaacaagcccactagaccctag

SEQ ID NO: 152 - DNA, 504 bp, Moniliella pollinis
  source 1..504: mol_type = genomic DNA
aatcgcctgtgtagcgaacggggccagctgggtaaggccagcggccggtagctaggactatgaggctaccaggctgctgggtaactaggcagctaggcacctaggcaactgagcaactgagcaactgggcaactgagcggtataggtttggcttgggcacagttgatattgatatcaaccagtcgctcgttcggttcaccagaacccagtgtgtggtagcgagcgtagaatagccaaaaggttttgagctgaggcgctgaggcgccacgggaggacatcaccgcctgagcacacaggatttcaaactgtcagacgggcgtggtgccagtgttggaagtgggcgaagcacctcgcatctaagacatgtaattaaactctcgacagccatcgtccattgacaccaacgtgcaccaacacacgcgagagctgcttcgttgtgcctgtcgacgacattgcctcgttccccagccaagtcgccccaccgctacaccaagcgcactcgca

SEQ ID NO: 153 - DNA, 499 bp, Moniliella pollinis
  source 1..499: mol_type = genomic DNA
catccgaaattggtggtttgacaaatgcaccttcttctccaggggctcgtgcaaacgcagtagccgagaagaggcgtaccggagaggaagacccaacaaccactgatcggtttgaagttggatgagaaagttgtgccaatcgcggagccgtagcaacgctacgagcgctacctacaacgactccacgcgcaatcggtacgcgcaaaggaacggatgagcgaccgagcaggttgcgcgaagccatgacgattgctctacccccaacgagctggatcaagttgggcagaacataatttatctcgcttccccgcgccacaagtagctccaccattcttctcaaaatagcccgattccgctttcgcggggcaaaacttccgcctataccgatccgattgaaacgccaaaaaaattaagttgtagtacgcctgttggtcgagcccgactggagcaccatttgagacactaggagataatttattcttttccttcttggccccca

SEQ ID NO: 154 - DNA, 300 bp, Moniliella pollinis
  source 1..300: mol_type = other DNA
cgggtaagaccaagtcggttggtgtttcgaacttcagcactcgtctggtcgacttggttgaggaagcttcgggcgaacgtcctgcggtaaaccagatcgaagctcaccccttgttgcaacaagacgagttggttgctcaccataagagcaagaacattgtcatcactgcttacagtcccttgggcaacaatgtcgctggtaaaccacctctgactgagaaccccggtattgtggatgctgctaagcgtttgaaccatactcctgctgctgtgctcattgcttggggtattcaacgcgggt

SEQ ID NO: 155 - DNA, 453 bp, Moniliella pollinis
  source 1..453: mol_type = genomic DNA
gcgaggagtagttactaggtagcggtatagcaattccgcccataatgcataaccgttctccctaccaaaacaaaacaatggctacgtggccggcgtgcgtggccgacatggtgcgggtgcggggggcggggtacgagtgtggggagttcactagttcgctggctagctgactagctgaccggcgtgtggttgtggcagtacgcagtgggaaagattaaatatgaaatattgaatatcaaaatgacgtttggggtggcacgtgcgcgcgccaacaacaacaagagcagccaccaagccaaagcaccaagcaccaaccccgcacaccattttgttacacccgcggcagaaatggcgtcagccagcagtcactattactcaatattcaataggggttccacttgactcacttcctcatgtatatatatatccatctaatcttcccaatacataacc

SEQ ID NO: 156 - DNA, 500 bp, Moniliella pollinis
  source 1..500: mol_type = genomic DNA
gcggcctatgcagacgcttggagcttgggcacattggatattggatattggctggctgccgttcgagatcccgttgctgtcgccaccgccaccggtcacgtggtcacttggtcacgtggaccacctgcactgcgcttagctacaagagtgcatgatgcatgatgtcatgcatgatatgcatgatacaagcatgaatattgatttcaatattgaacatttagtattgatatctcgatatgcgtaacacgtgacacgcaccatatcaatcagccgcaccggcactaaatgtttcaatttcaacatcccacacgctcgaatgctccctcgagctaatcggatttcggagctccgacatggccggcctcgagcggagtttgaaactccgttccgcccgaccccgctggtcgccgcgatgaaatcccgagtcaagtcatagcaagccaagtggctggctgactcaaaagctaataaaagtcgtagcaagtaatactccgcacgct

SEQ ID NO: 157 - DNA, 500 bp, Moniliella pollinis
  source 1..500: mol_type = genomic DNA
tcgcgtcttcaaaccgtggcgcgcgacacgtgccgcgaccaaaatttgttggtgtatgggaatagggttttctaaaattctgttgaggatgtgagtatcactggcatggcaccagtgtactgctcatcgataatcataaacgtatcaacccttcggctctgcgatctgtatctgctactggagggcacagcaagccttctgcttggttgcgctctgcgctctctgtggtgctttgccgctcgcggccaaggtccgcagcgggcattcaccaccatacgggttaagccaccagacgagtgctgctcgccgggccagctcggcgcctgtcacgcccccacattggcttgatgctcggctccttctttcatcttggaaccggcgggcaatggcgcttatcaccactcctgggccgggccccgcgtatactctcataactagtgcacgctttcaaataaatacctcgcctcctggctggccgaccgacgtttacccatccgccc

SEQ ID NO: 158 - DNA, 499 bp, Moniliella pollinis
  source 1..499: mol_type = genomic DNA
tggcatgtaggcctgtaggggctatgcctatatgctcatgcactcatgtcgcgatgttgcgatatcgcgatggaccaaccaagcaagcgtgcagcgtgggcgcttgggccaagggtgctaagctaagtgtaagcactgaagtgctgaagtgctgaagtgctgaacgtggaacgtcaggatgacacatcctctcccttcggcttcgtccaagaaaggttggtcagccatctgagatctgagatctgaaatgaatataatgatgaattgagtcgatgagatctgactatcttgggagattgcaccaatgcgccacggtgaccagatggtcttggtcttagctggtatagtggcacctgatctgccttgacagatctcatgttcatacgttcatgcattcaatcttatcgtctagccgtctgcgatctgcccaactagacgacgacaaatgtaattgatccttgtaaccctgttgctggtcgcagcagcgcgatacgatgcc

SEQ ID NO: 159 - DNA, 500 bp, Moniliella pollinis
  source 1..500: mol_type = genomic DNA
aaatcttcatccagcgtagcaagcatatcgcgcatgtccgagttcctcgagtgtgcataccgaacccaaaaagccatggatgtcattgacctgctgtattcatcaatcgagatatctttactccggagcgtacagtggcagatattatgtaggagatgatgggacaggatgcagagatacataatccatttccagttaatagggccgctagatacttgatattagcctggcagcgagcgagcgagggtagagtagaatagagtccagtatagatcccaccccatggtgcgggaagtggatgacgtaatagcgcgatagctccccgctcccttgtcacctaggccacgggaccctacgtgattgcatcgtgcgtgtcgtcgcctgtcgacgcctggtgcaggcatacgctgcgtgcttcgacgatcaacaacaccaccaaccacgactccagttccggccagccagtaccatggcgtcgttctttgggtttagtgcaccgg

SEQ ID NO: 160 - DNA, 400 bp, Moniliella pollinis
  source 1..400: mol_type = other DNA
aaccagatcgaagctcaccccttgttgcaacaagacgagttggttgctcaccataagagcaagaacattgtcatcactgcttacagtcccttgggcaacaatgtcgctggtaaaccacctctgactgagaaccccggtattgtggatgctgctaagcgtttgaaccatactcctgctgctgtgctcattgcttggggtattcaacgcgggtacagcgtcttggtcaagtcagttacaccctcacggatcaagagtaactttgaacagatcactctgtctgatgaggaattccaacgggttaccaacctcatcaaggagtacggtgagagccgtaacaacgttcctttcaattacaagccttcgtggtccattgacgtctttggtacccaggacgaggcta

SEQ ID NO: 161 - DNA, 500 bp, Moniliella pollinis
  source 1..500: mol_type = genomic DNA
atcctgtgctcgtctcttacattcatcttcctgcccataaaactttcaagctatttcctccaacgtactcaacaacctatttttttgggccccgctcaaaacgcaccttattgcgtctaagtgtattctaaccacgcgacctgaattgcaaagcctgttacccccatcgcaccttcgtcttaagatagttgtttaacgagccttggccagttttagccttgaccatgactacagatcataatggttagatgcttcttgatcgataatgatatattgcatgtcgacgattgaagatttattggatgtcgatgacgactgtcgagctcttattcttagcaacaacttaaatattcactatcgaatgcacgcgacatcatgcatcgtgctcatgaatatcactggatcactctcgatcgcagcccactaggtcagcataacacgcttgaagctgacttgaagctttggaacaaatggcagcaacagtggcggtcacggtgacc

SEQ ID NO: 162 - DNA, 486 bp, Moniliella pollinis
  source 1..486: mol_type = genomic DNA
attgttgcatcgtctcatcagatcgtccttcattgtagtgataattggtgcaaccttgtattagactgtatagcagaatccctcgctataaaaagtattatgcatacgcagttccaagcaggaattagtatggtagtgggacttggctgaagggctgacgacatggcgagaaaaacgtatcaattcggaacacactgtgcaatgtcgatcacgttttcggtggttcacggtaggcttcctagtccatgggaaagtggtaacatctatcccttgagcgcttgagcttaatgttaccttgtgcaaaagtcatttgaagcttcacttgaagcttgaagctttgaagttttgaagcttgaagcgcaaacagcagcggtacatgtatactggcgtaacctgcctacagtggtgcatcagtacgtcaagcgggtagcccgaaatctcattaaggtcatttgccctctaagcttagtacctagtgatctgttc

SEQ ID NO: 163 - DNA, 501 bp, Moniliella pollinis
  source 1..501: mol_type = genomic DNA
cctgaacgtcctgaactctgtcttattacataccattaatttccctgccttccctctctacgtcatcggaattttatctcttcctgagcagcaaagatttggtccttgtccgggatacaacggagagtcatgattgggtttatggaagagaggcgatagcacttgcattttgaccattcggggattaagcgaacccccaagtggcacaaagagctcgtatgagggtcagtaagtatagagggacatgcaaaggagagaaaaggaaacacaatattgacaaatagagacaagtacaggtgatcgcaatagcatgatgtaggggtatgcgcaagtcacaatcgttcagggcgggcataacatcagcgtacccgagcacaatggttaatgattaatgagcagaggaaaaaataatgattatgccggggatggcaggactaactggcgcagctcttcagcttcggcaacgcgtgcacatagtggtgtagcaccacgagattgagc

SEQ ID NO: 164 - DNA, 493 bp, Moniliella pollinis
  source 1..493: mol_type = genomic DNA
cctttgcctcacgcctctcgtttgcacgcttcttcacggcttatcaccgcttattatatccatggaatcccctccaaagttttcttcaacatagcttcatatcttctaccataacatctatcccaccaagtagcacatgaattcaacgtagcttgagaacttttcctcgtcagctgattgcgttctttaggcagtttgcttctaccccaattgcttctaccccaattgcttctgcttatttcaccagtccgctcggagatctctgacaactctgagatctgatgatcaacctcttgtgcaacttgtaaaatttgatcgatgagacgattagggacttgaagctttaagttagacgcgatgggcggtaatctatatgcttagactttgttgctatgtttgtcctataagatctgatgcatgatgtatcattacccagacgggctatcgcacaaggtgcagatgcatcttatcatgacagtgccacactgttggc

SEQ ID NO: 165 - DNA, 567 bp, Moniliella pollinis
  source 1..567: mol_type = genomic DNA
gcttgctggtcacattattgtcagtacctaccatgaagaattcaatattattttacattgtcaaccattacatggatcccatgttgtgcatagcctctatgtcatcctttggtcttttatgtctgtagcgtgctagtagtattcaagttgtagcactgctgtgaaacagtacgttcaagtagtgtgcagcagtacgttcagttagtggactggggcagcctcgccttcagcaaaggttaggtacatgagccagttgctcactcttgctttctacgaatcccataggctactttgccccctaaccgtgacgaccccctgtgtttgagaagtttgagtctttttacgttaccgtgaccaagcgagcagagtagaaactcttgaagttgtgtatgtaagaatacaaattgagaacacaaggttacctacctttatagttggtaaacagcaagcaataccagagattttcatcgcaacgtgactctatcattcactatattaagttgcacacggatgttgtacaacactacacgtaaaagagagaaaaatactaatgtcgatcgctcaggt

SEQ ID NO: 166 - DNA, 504 bp, Moniliella pollinis
  source 1..504: mol_type = genomic DNA
ttgctgctacgacctcattgatcgatgatctccgacactttgagtagctttccatcctctctttactgtactttgtattcttgctactttgtgttctttcttaatggtcccgaaccggtgattttgctcatgatctttttttttttttttcgtcaactgcaagaagatgaaaaatctactgttcgatagcacctcataaccgttccagagtcccgacaaccacaaggatgtttcttagataggtgtcagcaagatccacaaaaaagtgtaggtattagatggtttcaagcaaggtacaatattctaattcaatactcatttgaataatcaatattcaacagcttctagcctacaagcttcaatgttctccgtcggttaactcagtatacttagtactcagttcaagtcagtgttgttaaaataaaatcacgtgatccaaaaacttgaaacttttcatttttctcctcagatgttggtgattcgtcccatagcggttaccacaac

SEQ ID NO: 167 - DNA, 1679 bp, synthetic construct
  source 1..1679: mol_type = other DNA
aagacctctgtcccacaaaccttgatggtctgtgaaaccgtcaacaacatcattggtagaactgtcaatccaagaaacaaaaattggtcctgtggtggttcttctggtggtgaaggtgctattgttggtattagaggtggtgttattggtgtcggtactgacattggtggttccattagagtcccagctgctttcaactttttatacggtttgagaccatctcacggtagattgccatatgctaaaatggctaactctatggaaggtcaagaaaccgttcactccgtcgttggtcctatcactcactccgtcgaagacttgagattgttcaccaaatctgtcttgggtcaagaaccttggaagtacgactctaaggtcatccccatgccatggagacaatctgaatctgacatcattgcctctaagattaagaatggtggtttgaacattggttattacaatttcgacggtaacgtcttgccacacccaccaattttacgtggtgtcgaaactaccgttgccgctttggccaaggctggtcacaccgttactccatggactccatacaagcatgatttctgtcatgacttgatttcccacatctatgctgctgatggttctgccgacgtcatgagagacatttctgcctctggtgagccagccatccctaacattaaggacttgttgaacccaaatattaaggctgttaacatgaacgaattgtgggacactcatttacaaaagtggaactatcaaatggaatacttggaaaagtggcgtgaagctgaagaaaaagctggtaaggaattggacgctattatcgctccaattactcctaccgtcgctgtcagacacgatcaattcagatactacggttacgcctccgttattagcttattggatttcacctctgttgtcgtcccagtcactttcgctgataagaatattgataagaagaacgaatcttttaaagctgtttccgaattggatgctttggttcaagaagaatacgacccagaggcttatcacggtgctcctgttgctgttcaagttattggtagaagattgtccgaagagagaactttggctatcgccgaagaagtcggtaaattgttgggtaacgtcgtcactccataatggtgttcaccactgttgcttcccctttgttggagcgtccgtcgttctgatggcgctctgagcccaaaatatcccttcttcgcccgagagcaagcctcggagtgtgcttgcaatctacttttcctactaaagttatcttcttgtggcttctgaatttgaatagaacgtgttcagacttgttagctaaatttgttgatgcgagatacttgacagaatcccgttgatgaactcatctgtgtgaccaccgcctggtgatggaatctcgcgcggaagccgtggtgttactgactctcaagcaattcagtagataaatttgtataacatcattgcaaggggtgctagcaatcaattgtccaataccaaacggcggcaagtgcaaaggggcgatagagagtttctgcgaggaagggaaggaatccgtatgcctgaaaacttttgtacaagtgtctttgtaagggcgaggtctgctctgacatctctctgagatctgagatctgatacctgcaggataacttcgtataatgtatgctatacgaagttat

SEQ ID NO: 168 - DNA, 876 bp, synthetic construct
  source 1..876: mol_type = other DNA
agatgtagccggcgctgtagagttttggacggataggttgggtttcagtcgagacttcgttgaagatgactttgcaggcgtcgtgcgtgatgatgtgaccctgtttatctcggccgttcaagatcaagttgtccctgacaatacacttgcatgggtctgggtacgcggattagatgaattgtacgcggaatggtctgaagttgtatccactaactttcgtgacgcttcaggtcctgctatgactgagattggtgaacaaccctgggggcgtgagttcgcactccgagatccagctggaaattgtgttcatttcgtagctgaggaacaggattaatggtgttcaccactgttgcttcccctttgttggagcgtccgtcgttctgatggcgctctgagcccaaaatatcccttcttcgcccgagagcaagcctcggagtgtgcttgcaatctacttttcctactaaagttatcttcttgtggcttctgaatttgaatagaacgtgttcagacttgttagctaaatttgttgatgcgagatacttgacagaatcccgttgatgaactcatctgtgtgaccaccgcctggtgatggaatctcgcgcggaagccgtggtgttactgactctcaagcaattcagtagataaatttgtataacatcattgcaaggggtgctagcaatcaattgtccaataccaaacggcggcaagtgcaaaggggcgatagagagtttctgcgaggaagggaaggaatccgtatgcctgaaaacttttgtacaagtgtctttgtaagggcgaggtctgctctgacatctctctgagatctgagatctgatacctgcaggataacttcgtataatgtatgctatacgaagttat

SEQ ID NO: 169 - DNA, 1087 bp, synthetic construct
  source 1..1087: mol_type = other DNA
gaagactgagtccgtctcagataacttcgtataatgtatgctatacgaagttatcctgcaggagctcagaccttgcatgttagccttgaccttgcctctatgaccactaattcgcacaagattgcacgttaccattgtcatcttgccatgtatccaatgtttcctgtttgccatagtacgtagtagatacatcgatcatcgatgcagatgacgcagatggcattggttcgctttgccctatgcatgcatcatgcatcatgcatcatgcgtcatgcgtcactatccatattaatcattgccctctgtactaggccatgacacctgcagacccttccccagggatgcttcttgtaatagccaatatactacacaactttaccgattacgatcgagatcgatctcactatagtttgtcgaacttcgatgcacatcgagggtgcggaaaaaagctgacggaagcggaagtgggtgaattggttaatttagttagattggcagggttgttcccaagattcaacgcaagctgagaaagaaaacagaaacacgaggcataaggccagtcagaaaatgcattacgaggggagttgaagtgactgtgggccagtgcctgggtcgtcatgtgcaaattttttcttcggttagactgccgcagcatgcagcaactctgccggccctatataactagtgcttcatcttcttgtcattcttgtctctttaccaacacaccggtactctttcaccatggcaaagttgacgagcgccgtgccggtgctaaccgcgagagatgtagccggcgctgtagagttttggacggataggttgggtttcagtcgagacttcgttgaagatgactttgcaggcgtcgtgcgtgatgatgtgaccctgtttatctcggccgttcaagatcaagttgtccctgacaatacacttgcatgggtctgggtacgcggattagatgaattgtacgcggaatggtctgaagttgtatccactaactttcgtgacgcttcaggtcctgctatgactgagattggtgaacaaccctgggggcgtgagttcgcactccgagatccagctggaaattgtg

SEQ ID NO: 170 - DNA, 1257 bp, synthetic construct
  source 1..1257: mol_type = other DNA
gaagactgagtccgtctcagataacttcgtataatgtatgctatacgaagttatcctgcaggagctcagaccttgcatgttagccttgaccttgcctctatgaccactaattcgcacaagattgcacgttaccattgtcatcttgccatgtatccaatgtttcctgtttgccatagtacgtagtagatacatcgatcatcgatgcagatgacgcagatggcattggttcgctttgccctatgcatgcatcatgcatcatgcatcatgcgtcatgcgtcactatccatattaatcattgccctctgtactaggccatgacacctgcagacccttccccagggatgcttcttgtaatagccaatatactacacaactttaccgattacgatcgagatcgatctcactatagtttgtcgaacttcgatgcacatcgagggtgcggaaaaaagctgacggaagcggaagtgggtgaattggttaatttagttagattggcagggttgttcccaagattcaacgcaagctgagaaagaaaacagaaacacgaggcataaggccagtcagaaaatgcattacgaggggagttgaagtgactgtgggccagtgcctgggtcgtcatgtgcaaattttttcttcggttagactgccgcagcatgcagcaactctgccggccctatataactagtgcttcatcttcttgtcattcttgtctctttaccaacacaccggtactctttcaccatgggaacgactttagatgataccgcctaccgttataggacatcagtaccgggcgatgcagaagcaattgaagcccttgatggatcattcaccacagacacagtttttcgcgtgacagctactggtgacggatttactctccgtgaagtgcctgtagatccgccattgacgaaagtatttccagatgatgagagtgatgacgagagcgatgatggcgaagatggtgatcctgactcgcgcactttcgtcgcatacggtgatgatggtgacctggccggatttgttgttgtgtcctactcggggtggaaccgtagattgaccgtcgaagatatcgaagtcgcgccagaacatcgtggtcatggcgtgggacgagcactgatgggtctagctacggaattcgctcgagagcgtggggcgggtcacttatggcttgaagttaccaatgtaaatgctcctgctattcacgcttatcgccgaatgggtttcaccttgtgtggcctcgacacggcattgtat

SEQ ID NO: 171 - DNA, 1049 bp, synthetic construct
  source 1..1049: mol_type = other DNA
attgaagcccttgatggatcattcaccacagacacagtttttcgcgtgacagctactggtgacggatttactctccgtgaagtgcctgtagatccgccattgacgaaagtatttccagatgatgagagtgatgacgagagcgatgatggcgaagatggtgatcctgactcgcgcactttcgtcgcatacggtgatgatggtgacctggccggatttgttgttgtgtcctactcggggtggaaccgtagattgaccgtcgaagatatcgaagtcgcgccagaacatcgtggtcatggcgtgggacgagcactgatgggtctagctacggaattcgctcgagagcgtggggcgggtcacttatggcttgaagttaccaatgtaaatgctcctgctattcacgcttatcgccgaatgggtttcaccttgtgtggcctcgacacggcattgtatgacggtactgcttctgacggggagcaagcgctatacatgtctatgccctgcccctaatggtgttcaccactgttgcttcccctttgttggagcgtccgtcgttctgatggcgctctgagcccaaaatatcccttcttcgcccgagagcaagcctcggagtgtgcttgcaatctacttttcctactaaagttatcttcttgtggcttctgaatttgaatagaacgtgttcagacttgttagctaaatttgttgatgcgagatacttgacagaatcccgttgatgaactcatctgtgtgaccaccgcctggtgatggaatctcgcgcggaagccgtggtgttactgactctcaagcaattcagtagataaatttgtataacatcattgcaaggggtgctagcaatcaattgtccaataccaaacggcggcaagtgcaaaggggcgatagagagtttctgcgaggaagggaaggaatccgtatgcctgaaaacttttgtacaagtgtctttgtaagggcgaggtctgctctgacatctctctgagatctgagatctgatacctgcaggataacttcgtataatgtatgctatacgaagttat

SEQ ID NO: 172 - DNA, 1199 bp, synthetic construct
  source 1..1199: mol_type = other DNA
cttaaacacggcaagggtagcgttgcaaacgacgtaaccgacgaaatggtccgtctgaattggctaactgagttcatgccactccccaccatcaagcacttcatccgtacacctgacgatgcgtggctgttgactacggccatccccggtaagaccgcttttcaggtcctcgaggaataccctgactcgggcgagaacatcgtggatgccttggctgtgtttttgcgccgccttcactctattccggtctgcaactgccctttcaacagcgaccgtgtttttaggcttgcccaggcacaatcacgcatgaacaatggtctagtcgacgctagtgatttcgatgacgagcgcaacggctggccggtggaacaagtgtggaaagagatgcataagctcctgcccttttccccagactctgtcgtgacgcatggtgatttctcgcttgacaacctcatctttgacgagggcaagctcattggctgcattgacgtcggccgggttggcatcgccgatcgctaccaagatcttgcgatcctctggaattgtctgggcgagttctcccctagcctccagaagcgtctgttccagaaatatgggatcgataacccagacatgaacaagctccagttccatttgatgctggatgaatttttctaatggtgttcaccactgttgcttcccctttgttggagcgtccgtcgttctgatggcgctctgagcccaaaatatcccttcttcgcccgagagcaagcctcggagtgtgcttgcaatctacttttcctactaaagttatcttcttgtggcttctgaatttgaatagaacgtgttcagacttgttagctaaatttgttgatgcgagatacttgacagaatcccgttgatgaactcatctgtgtgaccaccgcctggtgatggaatctcgcgcggaagccgtggtgttactgactctcaagcaattcagtagataaatttgtataacatcattgcaaggggtgctagcaatcaattgtccaataccaaacggcggcaagtgcaaaggggcgatagagagtttctgcgaggaagggaaggaatccgtatgcctgaaaacttttgtacaagtgtctttgtaagggcgaggtctgctctgacatctctctgagatctgagatctgatacctgcaggataacttcgtataatgtatgctatacgaagttat

SEQ ID NO: 173 - DNA, 1621 bp, synthetic construct
  source 1..1621: mol_type = other DNA
tattctggtacgagccatcccaaaaatggatcatgacagctgccaagagccaggactataagattgagatctacagcagcgatgacctcaagtcctggaagctcgaaagcgcctttgcgaacgaaggctttcttggctatcagtatgagtgccccggcctcatcgaggtgcctaccgagcaagatcctagcaagagctactgggtgatgttcatctctatcaatccgggagcacccgcgggcggctccttcaaccagtattttgtgggttcgttcaacggaacgcactttgaagcttttgataatcagtcaagagtcgtcgactttggcaaagactactacgccctccagaccttctttaacacggatccaacgtacggttcggcactgggcatcgcgtgggcgtcgaactgggagtatagcgcctttgtccccactaacccttggcgctcgtcgatgtcgttagtgcgtaagttctcgctgaacaccgagtaccaggcaaatccggagacagaactaatcaaccttaaggcagagcctatcttgaacatctctaacgccggaccctggtctaggttcgccaccaacaccacgctcactaaggccaatagttacaatgtcgatctaagcaattcaacgggcacactggaattcgagctcgtttacgcagtcaacaccacccagacgatctcgaaatccgtctttgcagatttgtcgctgtggttcaagggccttgaggacccggaagagtacctccgcatgggttttgaagtctcagcgtcatcgttcttcctcgaccgcgggaattctaaggtaaagttcgtgaaggaaaacccctactttaccaatcgtatgtctgtgaacaatcagccattcaaatcggagaacgacctgtcctactacaaggtttacggccttctcgaccaaaacatcctcgagttgtactttaacgacggtgatgttgtgtcgacaaacacttatttcatgacaacgggaaacgctctcggatccgtcaatatgactacgggtgtcgacaatctgttttacattgacaaattccaggtgcgagaagtcaagtaatggtgttcaccactgttgcttcccctttgttggagcgtccgtcgttctgatggcgctctgagcccaaaatatcccttcttcgcccgagagcaagcctcggagtgtgcttgcaatctacttttcctactaaagttatcttcttgtggcttctgaatttgaatagaacgtgttcagacttgttagctaaatttgttgatgcgagatacttgacagaatcccgttgatgaactcatctgtgtgaccaccgcctggtgatggaatctcgcgcggaagccgtggtgttactgactctcaagcaattcagtagataaatttgtataacatcattgcaaggggtgctagcaatcaattgtccaataccaaacggcggcaagtgcaaaggggcgatagagagtttctgcgaggaagggaaggaatccgtatgcctgaaaacttttgtacaagtgtctttgtaagggcgaggtctgctctgacatctctctgagatctgagatctgatacctgcaggataacttcgtataatgtatgctatacgaagttat

SEQ ID NO: 174 - DNA, 1903 bp, synthetic construct
  source 1..1903: mol_type = other DNA
ataacttcgtataatgtatgctatacgaagttatcctgcaggagctcagaccttgcatgttagccttgaccttgcctctatgaccactaattcgcacaagattgcacgttaccattgtcatcttgccatgtatccaatgtttcctgtttgccatagtacgtagtagatacatcgatcatcgatgcagatgacgcagatggcattggttcgctttgccctatgcatgcatcatgcatcatgcatcatgcgtcatgcgtcactatccatattaatcattgccctctgtactaggccatgacacctgcagacccttccccagggatgcttcttgtaatagccaatatactacacaactttaccgattacgatcgagatcgatctcactatagtttgtcgaacttcgatgcacatcgagggtgcggaaaaaagctgacggaagcggaagtgggtgaattggttaatttagttagattggcagggttgttcccaagattcaacgcaagctgagaaagaaaacagaaacacgaggcataaggccagtcagaaaatgcattacgaggggagttgaagtgactgtgggccagtgcctgggtcgtcatgtgcaaattttttcttcggttagactgccgcagcatgcagcaactctgccggccctatataactagtgcttcatcttcttgtcattcttgtctctttaccaacacaccggtactctttcaccatgccacaatcctgggaagaattggccgccgacaaacgtgcccgtttggctaaaaccattcctgacgaatggaaggttcaaactttgcctgccgaagattccgttattgatttcccaaagaagtccggtattttgtctgaggctgaattgaagattaccgaagcctctgctgctgatttggtttccaagttggccgctggtgagttgacttctgttgaagtcactttggctttttgtaagagagctgctattgctcaacaattaaccaactgtgctcacgaattcttcccagatgctgctttagctcaagctagagaattagatgaatactacgctaagcataagcgtccagttggtccattacacggtttaccaatctctttaaaggaccaattgcgtgttaagggttacgaaacctccatgggttacatttcctggttaaacaaatacgatgaaggtgattccgtcttaaccaccatgttgagaaaagctggtgctgttttctacgttaagacctctgtcccacaaaccttgatggtctgtgaaaccgtcaacaacatcattggtagaactgtcaatccaagaaacaaaaattggtcctgtggtggttcttctggtggtgaaggtgctattgttggtattagaggtggtgttattggtgtcggtactgacattggtggttccattagagtcccagctgctttcaactttttatacggtttaagaccatctcacggtagattgccatatgctaaaatggctaactctatggaaggtcaagaaaccgttcactccgtcgttggtcctatcactcactccgtcgaagacttgagattgttcaccaaatctgtcttgggtcaagaaccttggaagtacgactctaaggtcatccccatgccatggagacaatctgaatctgacatcattgcctctaagattaagaatggtggtttgaacattggttattacaatttcgacggtaacgtcttgccacacccaccaattttacgtggtgtcgaaactaccgttgccgctttggccaaggctggtcacaccgttactccatggactccatacaagcatgatttctgtcatgacttgatttcccacatctatgctgctgatggttctgccgacgtcatgagagacatttctgcctctggtgagccagccatccctaac

SEQ ID NO: 175 - DNA, 1475 bp, synthetic construct
  source 1..1475: mol_type = other DNA
ataacttcgtataatgtatgctatacgaagttatcctgcaggagctcagaccttgcatgttagccttgaccttgcctctatgaccactaattcgcacaagattgcacgttaccattgtcatcttgccatgtatccaatgtttcctgtttgccatagtacgtagtagatacatcgatcatcgatgcagatgacgcagatggcattggttcgctttgccctatgcatccatcatgcatcatgcatcatgcatcatgcgtcactatccatattaatcattgccctctgtactaggccatgacacctgcagacccttccccagggatgcttcttgtaatagccaatatactacacaactttaccgattacgatcgagatcgatctcactatagtttgtcgaacttcgatgcacatcgagggtgcggaaaaaagctgacggaagcggaagtgggtgaattggttaatttagttagattggcagggttgttcccaagattcaacgcaagctgagaaagaaaacagaaacacgaggcataaggccagtcagaaaatgcattacgaggggagttgaagtgactgtgggccagtgcctgggtcgtcatgtgcaaattttttcttcggttagactgccgcagcatgcagcaactctgccggccctatataactagtgcttcatcttcttgtcattcttgtctctttaccaacacaccggtactctttcaccatgggtaaggaaaagacacacgtatcgcgaccccgactcaactccaacatggacgcagacctgtacggatacaaatgggctcgagataatgtcggacagtcgggtgcgacgatctacagactctatggaaaaccggacgcccccgagctctttcttaaacacggcaagggtagcgttgcaaacgacgtaaccgacgaaatggtccgtctgaattggctaactgagttcatgccactccccaccatcaagcacttcatccgtacacctgacgatgcgtggctgttgactacggccatccccggtaagaccgcttttcaggtcctcgaggaataccctgactcgggcgagaacatcgtggatgccttggctgtgtttttgcgccgccttcactctattccggtctgcaactgccctttcaacagcgaccgtgtttttaggcttgcccaggcacaatcacgcatgaacaatggtctagtcgacgctagtgatttcgatgacgagcgcaacggctggccggtggaacaagtgtggaaagagatgcataagctcctgcccttttccccagactctgtcgtgacgcatggtgatttctcgcttgacaacctcatctttgacgagggcaagctcattggctgcattgacgtcggccgggttggcatcgccgatcgctaccaagatcttgcgatcctctggaattgtctgggcgagttctcccctagcctccagaagcgtctgttccagaaatatgggatcg

SEQ ID NO: 176 - DNA, 1982 bp, synthetic construct
  source 1..1982: mol_type = other DNA
ataacttcgtataatgtatgctatacgaagttatcctgcaggagctcagaccttgcatgttagccttgaccttgcctctatgaccactaattcgcacaagattgcacgttaccattgtcatcttgccatgtatccaatgtttcctgtttgccatagtacgtagtagatacatcgatcatcgatgcagatgacgcagatggcattggttcgctttgccctatgcatgcatcatgcatcatgcatcatgcgtcatgcgtcactatccatattaatcattgccctctgtactaggccatgacacctgcagacccttccccagggatgcttcttgtaatagccaatatactacacaactttaccgattacgatcgagatcgatctcactatagtttgtcgaacttcgatgcacatcgagggtgcggaaaaaagctgacggaagcggaagtgggtgaattggttaatttagttagattggcagggttgttcccaagattcaacgcaagctgagaaagaaaacagaaacacgaggcataaggccagtcagaaaatgcattacgaggggagttgaagtgactgtgggccagtgcctgggtcgtcatgtgcaaattttttcttcggttagactgccgcagcatgcagcaactctgccggccctatataactagtgcttcatcttcttgtcattcttgtctctttaccaacacaccggtactctttcaccatgttgcttcaagctttcctttttctgctcgctggtttcgccgctaagattagcgctagcatgacgaacgaaacctctgaccggccgttggtccacttcacccccaacaagggttggatgaacgacccaaacggcctctggtatgatgagaaagacgctaagtggcacctgtacttccagtataaccctaacgatacagtttggggtacgcccttgttttggggccatgcgacctccgacgacctcaccaactgggaagatcagcctatcgcgattgctccgaagcgtaacgattcaggtgcctttagtggcagtatggtcgtagactacaacaacaccagcggtttcttcaacgacactatcgatccacgacagcgctgtgttgccatatggacctacaacacgccggagtccgaggaacaatacattagttactcgctggacgggggatacacctttacagagtaccagaaaaatcccgtcctcgccgcaaactcgactcaattccgcgatcctaaggtattctggtacgagccatcccaaaaatggatcatgacagctgccaagagccaggactataagattgagatctacagcagcgatgacctcaagtcctggaagctcgaaagcgcctttgcgaacgaaggctttcttggctatcagtatgagtgccccggcctcatcgaggtgcctaccgagcaagatcctagcaagagctactgggtgatgttcatctctatcaatccgggagcacccgcgggcggctccttcaaccagtattttgtgggttcgttcaacggaacgcactttgaagcttttgataatcagtcaagagtcgtcgactttggcaaagactactacgccctccagaccttctttaacacggatccaacgtacggttcggcactgggcatcgcgtgggcgtcgaactgggagtatagcgcctttgtccccactaacccttggcgctcgtcgatgtcgttagtgcgtaagttctcgctgaacaccgagtaccaggcaaatccggagacagaactaatcaaccttaaggcagagcctatcttgaacatctctaacgccggaccctggtctaggttcgccaccaacaccacgctcactaaggccaatagttacaatgtcgatctaagcaattcaacgggcacactggaattcgagctcgtttacgcagtcaacaccacccagacgatctcgaaatccgtctttgcagatttgtcgctgtggttcaagggccttgaggacc

SEQ ID NO: 177 - DNA, 4289 bp, synthetic construct
  source 1..4289: mol_type = other DNA
cttaaacacggcaagggtagcgttgcaaacgacgtaaccgacgaaatggtccgtctgaattggctaactgagttcatgccactccccaccatcaagcacttcatccgtacacctgacgatgcgtggctgttgactacggccatccccggtaagaccgcttttcaggtcctcgaggaataccctgactctggcgagaacatcgtggatgccttggctgtgtttttgcgccgccttcactctattccggtctgcaactgccctttcaacagcgaccgtgtttttaggcttgcccaggcacaatcacgcatgaacaatggtctagtcgacgctagtgatttcgatgacgagcgcaacggctggccggtggaacaagtgtggaaagagatgcataagctcctgcccttttccccagactctgtcgtgacgcatggtgatttctcgcttgacaacctcatctttgacgagggcaagctcattggctgcattgacgtcggccgggttggcatcgccgatcgctaccaagatcttgcgatcctctggaattgtctgggcgagttctcccctagcctccagaagcgtctgttccagaaatatgggatcgataacccagacatgaacaagctccagttccatttgatgctggatgaatttttctaatggtgttcaccactgttgcttcccctttgttggagcgtccgtcgttctgatggcgctctgagcccaaaatatcccttcttcgcccgagagcaagcctcggagtgtgcttgcaatctacttttcctactaaagttatcttcttgtggcttctgaatttgaatagaacgtgttcagacttgttagctaaatttgttgatgcgagatacttgacagaatcccgttgatgaactcatctgtgtgaccaccgcctggtgatggaatctcgcgcggaagccgtggtgttactgactctcaagcaattcagtagataaatttgtataacatcattgcaaggggtgctagcaatcaattgtccaataccaaacggcggcaagtgcaaaggggcgatagagagtttctgcgaggaagggaaggaatccgtatgcctgaaaacttttgtacaagtgtctttgtaagggcgaggtctgctctgacatctctctgagatctgagatctgatacctgcaggataacttcgtataatgtatgctatacgaagttatgtcacagtatcggcatctctgtctttagctacgatggtgtgcgtgtaactgatcagtacacccgctgtatcaaaactctatcttcaatccgctaagaatcgtcaccatcagtacatcagtacatcagtgggctaagatctaatggtgtcgttcgacggccgcgggcactagccacgagccaagagcggtacagttgctgcgaaatggtgggcagcctgacaggttcagtttgaataggatgaaaacgccatgaagaacagagaagctggcaattgacgatagtggggcgagcgcacgctgcttgctggtccgagcgtaggacgaacgacaaaccatgggcggggccaccaggccccagggagggcgtcactggttggatgtcgtctgttaggctagagctcaggcgctcagggcctctggcccaagcctcggacgcaagcctctgacgagcgagcgcgcgctggggcgggtctgcgcaggaacggcaggactgccgagttggttgaatattgaatggttggatgattggtttgctgggtttggttttgacacgcacggcacaggacaagtgagtttggaggttggatttgcgcaggtagaaagggcgctcggcctcagggcctcagcgtcagcagacgagctcgccagtccaggtcagtacccagtgttcgttacttcccaccgtccagagtttgctgctgcctctcagcttgattcgtgtcggagaagtagaaatggtcacagcgtaccacacactgtccccatgcctgcgtcctgctccacgagtgtttagccacaaaaatttatggacaaccttactgagcctgtgctggggggtgctttagcaccagcactggcgccatggcgtcaaggttaattccactgtcattcgacaaccttcaactgatgggggcaactgggcacaaaaccttggatatataaccaactccaactcccacggttttttaccttttgctcttctccccaggactcactacttctactcctctattcatcttcaccaaaatgaaagccgcggtcctccatggaacgaacgacatgcgcttcgaggatattgaaatcaagccgtgcgaaagcgacgaggtcaagatcaaggtcatggccgctggcatttgtggatctgatcccccccgagtgctgaaacattggaagtatcctgttccggctattcctggacatgagttctctggtgttatcgcggaggtcggaaaagatgtgaaaaatgtcaaggtgggtgaccgagttgtggcgatcccctttattccgtgtaatgaatgtgagtactgtaaacgaggtctttttagcctttgtgacgatcacggaatgctgggtgccaaatcctttggagcatttgccgagtatgtgaacattaaggcgactaatgtccttcccatcggcgatatggatttcgaagacgcagcgatgattgagccccttgccgtcgccatgcacggagtgttgaacatcggagttcaagtgggagatacggtcgccgtcatgggctcgggcacaatgggtcaacttgtgattcagggtcttaaaattgctggtgctggcactatcattgctgttgacatttctgataacaaactgcgagagtccaaggaattgggcgctgacattatcattaacgcaaaggacattaaccctgttgaaaaaatcaaagagcttacaggcggaaaaggagtggacatcgctctggaatgtgcgggttccaaaattacccaagagcaatgcctcttgatcactaaaaaaaagtcgaagatcggtttcctgggaattgcgtactctgacattaccttgtcggaggaggcgttcgagaacatctttcgcaaagagctcgaacttaaaggattctggaacagctattcggcaccctttcctggccaagagtggaccaagggcattaatcttgttaacgagggaaaaattaagctgaaggaaatggtttcgcaccgcttttctcttgaggatacgtataaagcgttcgagatgatccgagatcgcaaggaagagtttaacaaaatcctgatccttccccagggcgtggaaaaataacacggatcaacaaaaatgtgcgccagctttgttgtgtgcccttttcctctagcggatcctatccacatttcgtgaatgaaccgattaagctctgacgagatttccttgttttctgtagatacctcttgtagaggtgtcaaagttatgttgtgatcgagagagttacctgcaaggtattatgcaagcggcttgatgaggacactcaactacgtgtgagtaggagtgcgttgctcagcagttgacgcgtgagccgcttgagcagcttgataaaggtcctaatcgtcttccagctgttggcagacgacaatgtgctgtagtagtaggataggcccgtaaaagtgtagaagcaataggttgagactgactgtaatgggtacttgcgttcaaagactgaaagtccaaaggattgctcaaaggcccctgaggtctgagcctctgagcgcgctcttcgtcaaaattcgccggggccatcggtcatcctctcgagggcagcatcttcctgcttgaagactgagtccgtctcagattgttgcatcgtctcatcagatcgtccttcattgtagtgataattggtgcaaccttgtattagactgtatagcagaatccctcgctataaaaagtattatgcatacgcagttccaagcaggaattagtatggtagtgggacttggctgaagggctgacgacatggcgagaaaaacgtatcaattcggaacacactgtgcaatgtcgatcacgttttcggtggttcacggtaggcttcctagtccatgggaaagtggtaacatctatcccttgagcgcttgagcttaatgttaccttgtgcaaaagtcatttgaagcttcacttgaagcttgaagctttgaagttttgaagcttgaagcgcaaacagcagcggtacatgtatactggcgtaacctgcctacagtggtgcatcagtacgtcaagcgggtagcccgaaatctcattaaggtcatttgccctctaagcttagtacctagtgatctgttc

SEQ ID NO: 178 - DNA, 4286 bp, synthetic construct
  source 1..4286: mol_type = other DNA
cttaaacacggcaagggtagcgttgcaaacgacgtaaccgacgaaatggtccgtctgaattggctaactgagttcatgccactccccaccatcaagcacttcatccgtacacctgacgatgcgtggctgttgactacggccatccccggtaagaccgcttttcaggtcctcgaggaataccctgactctggcgagaacatcgtggatgccttggctgtgtttttgcgccgccttcactctattccggtctgcaactgccctttcaacagcgaccgtgtttttaggcttgcccaggcacaatcacgcatgaacaatggtctagtcgacgctagtgatttcgatgacgagcgcaacggctggccggtggaacaagtgtggaaagagatgcataagctcctgcccttttccccagactctgtcgtgacgcatggtgatttctcgcttgacaacctcatctttgacgagggcaagctcattggctgcattgacgtcggccgggttggcatcgccgatcgctaccaagatcttgcgatcctctggaattgtctgggcgagttctcccctagcctccagaagcgtctgttccagaaatatgggatcgataacccagacatgaacaagctccagttccatttgatgctggatgaatttttctaatggtgttcaccactgttgcttcccctttgttggagcgtccgtcgttctgatggcgctctgagcccaaaatatcccttcttcgcccgagagcaagcctcggagtgtgcttgcaatctacttttcctactaaagttatcttcttgtggcttctgaatttgaatagaacgtgttcagacttgttagctaaatttgttgatgcgagatacttgacagaatcccgttgatgaactcatctgtgtgaccaccgcctggtgatggaatctcgcgcggaagccgtggtgttactgactctcaagcaattcagtagataaatttgtataacatcattgcaaggggtgctagcaatcaattgtccaataccaaacggcggcaagtgcaaaggggcgatagagagtttctgcgaggaagggaaggaatccgtatgcctgaaaacttttgtacaagtgtctttgtaagggcgaggtctgctctgacatctctctgagatctgagatctgatacctgcaggataacttcgtataatgtatgctatacgaagttatgtcacagtatcggcatctctgtctttagctacgatggtgtgcgtgtaactgatcagtacacccgctgtatcaaaactctatcttcaatccgctaagaatcgtcaccatcagtacatcagtacatcagtgggctaagatctaatggtgtcgttcgacggccgcgggcactagccacgagccaagagcggtacagttgctgcgaaatggtgggcagcctgacaggttcagtttgaataggatgaaaacgccatgaagaacagagaagctggcaattgacgatagtggggcgagcgcacgctgcttgctggtccgagcgtaggacgaacgacaaaccatgggcggggccaccaggccccagggagggcgtcactggttggatgtcgtctgttaggctagagctcaggcgctcagggcctctggcccaagcctcggacgcaagcctctgacgagcgagcgcgcgctggggcgggtctgcgcaggaacggcaggactgccgagttggttgaatattgaatggttggatgattggtttgctgggtttggttttgacacgcacggcacaggacaagtgagtttggaggttggatttgcgcaggtagaaagggcgctcggcctcagggcctcagcgtcagcagacgagctcgccagtccaggtcagtacccagtgttcgttacttcccaccgtccagagtttgctgctgcctctcagcttgattcgtgtcggagaagtagaaatggtcacagcgtaccacacactgtccccatgcctgcgtcctgctccacgagtgtttagccacaaaaatttatggacaaccttactgagcctgtgctggggggtgctttagcaccagcactggcgccatggcgtcaaggttaattccactgtcattcgacaaccttcaactgatgggggcaactgggcacaaaaccttggatatataaccaactccaactcccacggttttttaccttttgctcttctccccaggactcactacttctactcctctattcatcttcaccaaaatgaaagcttccatgctggaggacttgaacaaattcagcgtcaaagagatcgacatcccgtcccccaaaaaggatgaggtcgtcgtgaaggtgatggcggcaggcacgtgtggatccgattcgcataaaatgattagcggatggaaatatggctatcccgcggtgatgggacacgaattttctggaattgtgacacaactgggagaaaacgtgtccaacgtcagcgtcggtcaacacgtcgccgtggctcccttcattccctgcttcaagtgtcattattgtcaaatcggactcttccagatgtgtgaaaattattccatgctcggtcagcaaaaatttggaggtttcgagcaatacgtttccgtcccggcacgtaacgttctggacatcggcaagatgtcgttcgaggaaggtgcccttattgaaccgatggcagttgcggcccacgctgttatgggaattaaaccggagctgggtgatacagttgcggtcttcggcctcggtacagtcggagatcttgttgtccgtcttcttatttcctcgggagcgacaaacgtcattggcattgacattgacgaccagaagcttgaaaagggactggatgagggttgcacacacgtgatcaactctgccaaagagtctcttgaagaaaagatcatggaatacaccgacggtctgggtgtcgatatttccatggaatgcgccggcagcaaaatcactgaggagcaaacactgctcgttacgaaacgccgtggaaaggttggatttgtcggtattgcttatagcgacgttctgctccatcagaaagcatttgagaacatcttccgccacgagcttacggtgactggattttggaattcctattccgcaccatttcctggacgcgagtggaccaactcgatccaattggttaatcgtggtcgtatcaagatcaaagatctcattactcatcgatttgagcttgaagacatgcaaaaagcattcaatatgatcaccactcgttcggaatcgtttaataaggtcatgtttttccccaacggcatcaattaacacggatcaacaaaaatgtgcgccagctttgttgtgtgcccttttcctctagcggatcctatccacatttcgtgaatgaaccgattaagctctgacgagatttccttgttttctgtagatacctcttgtagaggtgtcaaagttatgttgtgatcgagagagttacctgcaaggtattatgcaagcggcttgatgaggacactcaactacgtgtgagtaggagtgcgttgctcagcagttgacgcgtgagccgcttgagcagcttgataaaggtcctaatcgtcttccagctgttggcagacgacaatgtgctgtagtagtaggataggcccgtaaaagtgtagaagcaataggttgagactgactgtaatgggtacttgcgttcaaagactgaaagtccaaaggattgctcaaaggcccctgaggtctgagcctctgagcgcgctcttcgtcaaaattcgccggggccatcggtcatcctctcgagggcagcatcttcctgcttgaagactgagtccgtctcagattgttgcatcgtctcatcagatcgtccttcattgtagtgataattggtgcaaccttgtattagactgtatagcagaatccctcgctataaaaagtattatgcatacgcagttccaagcaggaattagtatggtagtgggacttggctgaagggctgacgacatggcgagaaaaacgtatcaattcggaacacactgtgcaatgtcgatcacgttttcggtggttcacggtaggcttcctagtccatgggaaagtggtaacatctatcccttgagcgcttgagcttaatgttaccttgtgcaaaagtcatttgaagcttcacttgaagcttgaagctttgaagttttgaagcttgaagcgcaaacagcagcggtacatgtatactggcgtaacctgcctacagtggtgcatcagtacgtcaagcgggtagcccgaaatctcattaaggtcatttgccctctaagcttagtacctagtgatctgttc

SEQ ID NO: 179 - protein, 231 aa, Moniliella pollinis
MVTALIAPSVLASDLGNLTAECKRMLDNGADWLHMDVMDGHFVPNIVLGAPILASVSKDLPGAELDCHMMVSSPEKWIKDVAAAGGKSYTFHLEATNDPLDIVRQIKAAGMRASVAINPGTPSAEISDALAQSLDMILVMTVWPGAGGQKFIAECMPKVTELRRRFPDLNIEVDGGVGPKTIDKCAKAGANVIVAGTAIFGADRPRDVIHFLRSQVNEAQEKLREEWAKSG

SEQ ID NO: 180 - protein, 231 aa, Moniliella pollinis
MPVCLIAPSILASDMGALTAECKRMLDCGADWLHMDVMDGHFVPNIVLGAPILASISKSLPDAELDCHMMVSAPEKWIKDIAAAGGKSYTFHLEATNDPLDTVRQIKASGMRAAVAINPGTPSAEISDELASQLDMILVMTVWPGAGGQKFIGECMPKVTELRRRFPDLNIEVDGGVGPKTIEKCAKAGANVIVAGTAIFHAERPRDVIHFLRTQVNEAQAQLKEEWAKSG

SEQ ID NO: 181 - DNA, 4064 bp, synthetic construct
  source 1..4064: mol_type = other DNA
gcgaggagtagttactaggtagcggtatagcaattccgcccataatgcataaccgttctccctaccaaaacaaaacaatggctacgtggccggcgtgcgtggccgacatggtgcgggtgcggggggcggggtacgagtgtggggagttcactagttcgctggctagctgactagctgaccggcgtgtggttgtggcagtacgcagtgggaaagattaaatatgaaatattgaatatcaaaatgacgtttggggtggcacgtgcgcgcgccaacaacaacaagagcagccaccaagccaaagcaccaagcaccaaccccgcacaccattttgttacacccgcggcagaaatggcgtcagccagcagtcactattactcaatattcaataggggttccacttgactcacttcctcatgtatatatatatccatctaatcttcccaatacataaccgtcatttagctacgatggtgtgcgtgtaactgatcagtacacccgctgtatcaaaactctatcttcaatccgctaagaatcgtcaccatcagtacatcagtacatcagtgggctaagatctaatggtgtcgttcgacggccgcgggcactagccacgagccaagagcggtacagttgctgcgaaatggtgggcagcctgacaggttcagtttgaataggatgaaaacgccatgaagaacagagaagctggcaattgacgatagtggggcgagcgcacgctgcttgctggtccgagcgtaggacgaacgacaaaccatgggcggggccaccaggccccagggagggcgtcactggttggatgtcgtctgttaggctagagctcaggcgctcagggcctctggcccaagcctcggacgcaagcctctgacgagcgagcgcgcgctggggcgggtctgcgcaggaacggcaggactgccgagttggttgaatattgaatggttggatgattggtttgctgggtttggttttgacacgcacggcacaggacaagtgagtttggaggttggatttgcgcaggtagaaagggcgctcggcctcagggcctcagcgtcagcagacgagctcgccagtccaggtcagtacccagtgttcgttacttcccaccgtccagagtttgctgctgcctctcagcttgattcgtgtcggagaagtagaaatggtcacagcgtaccacacactgtccccatgcctgcgtcctgctccacgagtgtttagccacaaaaatttatggacaaccttactgagcctgtgctggggggtgctttagcaccagcactggcgccatggcgtcaaggttaattccactgtcattcgacaaccttcaactgatgggggcaactgggcacaaaaccttggatatataaccaactccaactcccacggttttttaccttttgctcttctccccaggactcactacttctactcctctattcatcttcaccaaaatgccagtctgtctgatcgctccttccattttggcctcggacatgggagcactcacagccgagtgtaagcgaatgcttgactgtggtgctgattggctgcacatgggtacgttgccgtttcttgtgcgtacagaggtattgattgtttttatttatttattgacattgttatactacttctattctggcttgggatgcttgtgcagacgtcatggacgggtaagttctagtttgagcggaaagggtggctggggagaagggcacgagaataccgcctgcaaattgagtactgactgagtttggattctttttttgtttgccagccattttgtcccgaacattgttcttggggcccctatccttgcttcaatctctaaatctttacccgatgccgaactggattgccatatgatggtatctgctcctgaaaaggtacgtgtattaggtcccaaccaaaacttttgctgatggattcctgacatgcctctctctctccccccctccctctgcatacaccagtggatcaaagatatcgctgctgcaggcggcaagtcttacacttttcatctggaagcaacaagtacgatgacttttccttcctttcgagactcaagcagtgaactaaccatttgattggcacagatgaccccttggacactgtacgacagatcaaagcatccggtatgcgcgcagctgttgctattaacccaggaaccccctcagccgaaatttctgatgaactcgctagccaattggacatgatcctcgtaatgactgtctggccgggagctggtggacaaaagtttattggggaatgtatgcctaaagtaaccgaactacgacgtcgattccccgatttgaatattgaagtcgatggaggagttggacctaaaacgattgagaaatgtgccaaagctggtgccaatgttattgtggctggtactgctatcttccatgctgaacgtccaagggacgtaattcatttcctacgaacgcaagtgaatgaagctcaggctcaactgaaagaggaatgggccaagagcggttgataagttgctccctttgctgttctatgatccaaaagatgcttagtgctccactctctactcccgactaccttttacgcattctgacatgactagtagtgcaatgttacccctggtgttttctcgcaatcactttctgtctgctatagcttttgatcgtcagtagttttttggtatagctaaagtagacttttgtacctggcgttcaatgtaattttactccttttttgtgcgatgcaacagatggtgtaaagatcgtcgttaaagttttggcttgatgcttgattcggtgacggttgcttgggtgatccttatatcgtctcctggtgttctcataagcccaggctcttcttagctatgtacaacaggtccaccactgactatgttatgtagaggcatgcatttaacttacggaaagatttaatggagaagaacgtacctagtcagatgcttgacatgaaaacgtattcctgcaattcacaaatcagtatcctgcctgtccactcgcttgaagactgagtccgtctcagataacttcgtataatgtatgctatacgaagttatcctgcaggagctcagaccttgcatgttagccttgaccttgcctctatgaccactaattcgcacaagattgcacgttaccattgtcatcttgccatgtatccaatgtttcctgtttgccatagtacgtagtagatacatcgatcatcgatgcagatgacgcagatggcattggttcgctttgccctatgcatgcatcatgcatcatgcatcatgcgtcatgcgtcactatccatattaatcattgccctctgtactaggccatgacacctgcagacccttccccagggatgcttcttgtaatagccaatatactacacaactttaccgattacgatcgagatcgatctcactatagtttgtcgaacttcgatgcacatcgagggtgcggaaaaaagctgacggaagcggaagtgggtgaattggttaatttagttagattggcagggttgttcccaagattcaacgcaagctgagaaagaaaacagaaacacgaggcataaggccagtcagaaaatgcattacgaggggagttgaagtgactgtgggccagtgcctgggtcgtcatgtgcaaattttttcttcggttagactgccgcagcatgcagcaactctgccggccctatataactagtgcttcatcttcttgtcattcttgtctctttaccaacacaccggtactctttcaccatggcaaagttgacgagcgccgtgccggtgctaaccgcgagagatgtagccggcgctgtagagttttggacggataggttgggtttcagtcgagacttcgttgaagatgactttgcaggcgtcgtgcgtgatgatgtgaccctgtttatctcggccgttcaagatcaagttgtccctgacaatacacttgcatgggtctgggtacgcggattagatgaattgtacgcggaatggtctgaagttgtatccactaactttcgtgacgcttcaggtcctgctatgactgagattggtgaacaaccctggg

SEQ ID NO: 182 - DNA, 1375 bp, synthetic construct
  source 1..1375: mol_type = other DNA
agatgtagccggcgctgtagagttttggacggataggttgggtttcagtcgagacttcgttgaagatgactttgcaggcgtcgtgcgtgatgatgtgaccctgtttatctcggccgttcaagatcaagttgtccctgacaatacacttgcatgggtctgggtacgcggattagatgaattgtacgcggaatggtctgaagttgtatccactaactttcgtgacgcttcaggtcctgctatgactgagattggtgaacaaccctgggggcgtgagttcgcactccgagatccagctggaaattgtgttcatttcgtagctgaggaacaggattaatggtgttcaccactgttgcttcccctttgttggagcgtccgtcgttctgatggcgctctgagcccaaaatatcccttcttcgcccgagagcaagcctcggagtgtgcttgcaatctacttttcctactaaagttatcttcttgtggcttctgaatttgaatagaacgtgttcagacttgttagctaaatttgttgatgcgagatacttgacagaatcccgttgatgaactcatctgtgtgaccaccgcctggtgatggaatctcgcgcggaagccgtggtgttactgactctcaagcaattcagtagataaatttgtataacatcattgcaaggggtgctagcaatcaattgtccaataccaaacggcggcaagtgcaaaggggcgatagagagtttctgcgaggaagggaaggaatccgtatgcctgaaaacttttgtacaagtgtctttgtaagggcgaggtctgctctgacatctctctgagatctgagatctgatacctgcaggataacttcgtataatgtatgctatacgaagttataactttgagttcagtttgggaactatttaaacctgcttgctggtcacattattgtcagtacctaccatgaagaattcaatattattttacattgtcaaccattacatggatcccatgttgtgcatagcctctatgtcatcctttggtctcttatgtctgtagcgtgctagtagtattcaagttgtagcactgctgtgaaacagtacgttcaagtagtgtgcagcagtacgttcagttagtggactggggcagcctcgccttcagcaaaggttaggtacatgagccagttgctcactcttgctttctacgaatcccataggctactttgccccctaaccgtgacgaccccctgtgtttgagaagtttgagtctttttacgttaccgtgaccaagcgagcagagtagaaactcttgaagttgtgtatgtaagaatacaaattgagaacacaaggttacctacctttatagttggtaaacagcaagcaataccagagatttt

SEQ ID NO: 183 - DNA, 3874 bp, synthetic construct
  source 1..3874: mol_type = other DNA
agatgtagccggcgctgtagagttttggacggataggttgggtttcagtcgagacttcgttgaagatgactttgcaggcgtcgtgcgtgatgatgtgaccctgtttatctcggccgttcaagatcaagttgtccctgacaatacacttgcatgggtctgggtacgcggattagatgaattgtacgcggaatggtctgaagttgtatccactaactttcgtgacgcttcaggtcctgctatgactgagattggtgaacaaccctgggggcgtgagttcgcactccgagatccagctggaaattgtgttcatttcgtagctgaggaacaggattaatggtgttcaccactgttgcttcccctttgttggagcgtccgtcgttctgatggcgctctgagcccaaaatatcccttcttcgcccgagagcaagcctcggagtgtgcttgcaatctacttttcctactaaagttatcttcttgtggcttctgaatttgaatagaacgtgttcagacttgttagctaaatttgttgatgcgagatacttgacagaatcccgttgatgaactcatctgtgtgaccaccgcctggtgatggaatctcgcgcggaagccgtggtgttactgactctcaagcaattcagtagataaatttgtataacatcattgcaaggggtgctagcaatcaattgtccaataccaaacggcggcaagtgcaaaggggcgatagagagtttctgcgaggaagggaaggaatccgtatgcctgaaaacttttgtacaagtgtctttgtaagggcgaggtctgctctgacatctctctgagatctgagatctgatacctgcaggataacttcgtataatgtatgctatacgaagttgtcaaacacgtagaacacagggatcgccatttgtccgaaatgcaatctttgctctcgaagcttgaagcttgaatagcttgaagcatgagtgcatgaggggctgctatgatcttccaaccaaacttgcttgggcattgcactttggctggatagctatcatttagctgacccccaaagagactgccaatgatatgatatttgtgtaggtgcacgagtggatgagtggcgcgactacctgtcacaagatagatgctcgatgcacttcatgtgaagtggctagtggatgtccggagactggagtacagtaaagagtttggagttgggaacagcgcgaatgaaagaggctcagagagaggtaggtttgatgtgacgtcaagcgggctagtcagttagcaagggagtatggaatgcagcgcgcaacgcgcagcgcggagcccagtgcgcctgcgctcaggtactcatactcagtactcagtactcaggcgccatgccggagcttacatgcaatcaattaaccctgacgtctggcgcggcctgacgcctgaggcctgaggcctgacgcggccaagctccaagcgcaaccccaggctggcttgcgctggcgggcgcgagacgcagcagggggcaagtgtcgcagagtcgccgatcggatctgtggaacagcacaggaggcccgtgcggtcggctgcgcagtgcggtggagaagctggaagctggaagctggaaggtggaacctggaacttggaacttggaaaggaagaagagcgggaaggcgatgcacgatgcacgatgcacgatggggttggattgcgtacgagtagccgcacagcgcacagcgcacaacactcaccccatgcccccacgccccagcccgtgctcgggccatgagctgctggcaaccccccgaggcagccggcctttaactcaagtagcattcgccgccggtcggttcttcttagcctcccaccaccaccacttgcccgtgcttggacgctaattacaataaaatggttaccgcactcattgccccttcggttcttgcctcggacctgggcaacttgactgccgaatgcaagcgaatgctggataatggggcggattggctccacatgggtgcgtcatcgatttgtattgcttgagcttgcttttaagccatttctggcgagcgctgctaaccctgctatcactttggcaaattggaacagatgttatggatgggtatgttggacgatagcagatgaggtgttttctgtggagttggagtaggatgtgtgctaatcatttgcgttgtacagtcacttcgtacccaacatcgtgcttggtgcaccaattttggcttcggtctccaaagaccttcctggtgccgagctggattgccacatgatggtatcttctcctgaaaaggtacgttacagaaatattgaccggcacatatgtgtataagggaaaaagctgacctgtttttgcggtttagtggatcaaagatgtggctgctgcaggaggcaaatcctatacgttccatctcgaagccactagtacgtatattcgatttactttgtgtcagccgacacaatctaaccttctttcttttctgctttttcagatgatccgctggacatcgtacgtcagatcaaagcggctggcatgcgtgcatcagttgcgattaaccctggtacgccatcggccgagatctcggatgcactggcccaatcactagatatgattctcgtcatgaccgtttggcctggtgctggtggtcaaaagtttattgcagagtgcatgcccaaagtgactgagttgcgtcggcgattccccgatttgaacattgaagttgatggtggtgtgggacctaaaacaattgacaagtgtgccaaagctggtgcaaatgtcattgtagcgggtacagcaatctttggtgcggatcgtcctagggatgtaatccatttccttcgttctcaagtcaacgaggctcaagagaagctgagggaagaatgggctaagagcgggtaacacggatcaacaaaaatgtgcgccagctttgttgtgtgcccttttcctctagcggatcctatccacatttcgtgaatgaaccgattaagctctgacgagatttccttgttttctgtagatacctcttgtagaggtgtcaaagttatgttgtgatcgagagagttacctgcaaggtattatgcaagcggcttgatgaggacactcaactacgtgtgagtaggagtgcgttgctcagcagttgacgcgtgagccgcttgagcagcttgataaaggtcctaatcgtcttccagctgttggcagacgacaatgtgctgtagtagtaggataggcccgtaaaagtgtagaagcaataggttgagactgactgtaatgggtacttgcgttcaaagactgaaagtccaaaggattgctcaaaggcccctgaggtctgagcctctgagcgcgctcttcgtcaaaattcgccggggccatcggtcatcctctcgagggcagcatcttcctgcttgaagactgagtccgtctcaggcttgctggtcacattattgtcagtacctaccatgaagaattcaatattattttacattgtcaaccattacatggatcccatgttgtgcatagcctctatgtcatcctttggtcttttatgtctgtagcgtgctagtagtattcaagttgtagcactgctgtgaaacagtacgttcaagtagtgtgcagcagtacgttcagttagtggactggggcagcctcgccttcagcaaaggttaggtacatgagccagttgctcactcttgctttctacgaatcccataggctactttgccccctaaccgtgacgaccccctgtgtttgagaagtttgagtctttttacgttaccgtgaccaagcgagcagagtagaaactcttgaagttgtgtatgtaagaatacaaattgagaacacaaggttacctacctttatagttggtaaacagcaagcaataccagagatttt

SEQ ID NO: 184 - DNA, 3922 bp, synthetic construct
  source 1..3922: mol_type = other DNA
agatgtagccggcgctgtagagttttggacggataggttgggtttcagtcgagacttcgttgaagatgactttgcaggcgtcgtgcgtgatgatgtgaccctgtttatctcggccgttcaagatcaagttgtccctgacaatacacttgcatgggtctgggtacgcggattagatgaattgtacgcggaatggtctgaagttgtatccactaactttcgtgacgcttcaggtcctgctatgactgagattggtgaacaaccctgggggcgtgagttcgcactccgagatccagctggaaattgtgttcatttcgtagctgaggaacaggattaatggtgttcaccactgttgcttcccctttgttggagcgtccgtcgttctgatggcgctctgagcccaaaatatcccttcttcgcccgagagcaagcctcggagtgtgcttgcaatctacttttcctactaaagttatcttcttgtggcttctgaatttgaatagaacgtgttcagacttgttagctaaatttgttgatgcgagatacttgacagaatcccgttgatgaactcatctgtgtgaccaccgcctggtgatggaatctcgcgcggaagccgtggtgttactgactctcaagcaattcagtagataaatttgtataacatcattgcaaggggtgctagcaatcaattgtccaataccaaacggcggcaagtgcaaaggggcgatagagagtttctgcgaggaagggaaggaatccgtatgcctgaaaacttttgtacaagtgtctttgtaagggcgaggtctgctctgacatctctctgagatctgagatctgatacctgcaggataacttcgtataatgtatgctatacgaagttgtcaaacacgtagaacacagggatcgccatttgtccgaaatgcaatctttgctctcgaagcttgaagcttgaatagcttgaagcatgagtgcatgaggggctgctatgatcttccaaccaaacttgcttgggcattgcactttggctggatagctatcatttagctgacccccaaagagactgccaatgatatgatatttgtgtaggtgcacgagtggatgagtggcgcgactacctgtcacaagatagatgctcgatgcacttcatgtgaagtggctagtggatgtccggagactggagtacagtaaagagtttggagttgggaacagcgcgaatgaaagaggctcagagagaggtaggtttgatgtgacgtcaagcgggctagtcagttagcaagggagtatggaatgcagcgcgcaacgcgcagcgcggagcccagtgcgcctgcgctcaggtactcatactcagtactcagtactcaggcgccatgccggagcttacatgcaatcaattaaccctgacgtctggcgcggcctgacgcctgaggcctgaggcctgacgcggccaagctccaagcgcaaccccaggctggcttgcgctggcgggcgcgagacgcagcagggggcaagtgtcgcagagtcgccgatcggatctgtggaacagcacaggaggcccgtgcggtcggctgcgcagtgcggtggagaagctggaagctggaagctggaaggtggaacctggaacttggaacttggaaaggaagaagagcgggaaggcgatgcacgatgcacgatgcacgatggggttggattgcgtacgagtagccgcacagcgcacagcgcacaacactcaccccatgcccccacgccccagcccgtgctcgggccatgagctgctggcaaccccccgaggcagccggcctttaactcaagtagcattcgccgccggtcggttcttcttagcctcccaccaccaccacttgcccgtgcttggacgctaattacaataaaatgccagtctgtctgatcgctccttccattttggcctcggacatgggagcactcacagccgagtgtaagcgaatgcttgactgtggtgctgattggctgcacatgggtacgttgccgtttcttgtgcgtacagaggtattgattgtttttatttatttattgacattgttatactacttctattctggcttgggatgcttgtgcagacgtcatggacgggtaagttctagtttgagcggaaagggtggctggggagaagggcacgagaataccgcctgcaaattgagtactgactgagtttggattctttttttgtttgccagccattttgtcccgaacattgttcttggggcccctatccttgcttcaatctctaaatctttacccgatgccgaactggattgccatatgatggtatctgctcctgaaaaggtacgtgtattaggtcccaaccaaaacttttgctgatggattcctgacatgcctctctctctccccccctccctctgcatacaccagtggatcaaagatatcgctgctgcaggcggcaagtcttacacttttcatctggaagcaacaagtacgatgacttttccttcctttcgagactcaagcagtgaactaaccatttgattggcacagatgaccccttggacactgtacgacagatcaaagcatccggtatgcgcgcagctgttgctattaacccaggaaccccctcagccgaaatttctgatgaactcgctagccaattggacatgatcctcgtaatgactgtctggccgggagctggtggacaaaagtttattggggaatgtatgcctaaagtaaccgaactacgacgtcgattccccgatttgaatattgaagtcgatggaggagttggacctaaaacgattgagaaatgtgccaaagctggtgccaatgttattgtggctggtactgctatcttccatgctgaacgtccaagggacgtaattcatttcctacgaacgcaagtgaatgaagctcaggctcaactgaaagaggaatgggccaagagcggttgataaacggatcaacaaaaatgtgcgccagctttgttgtgtgcccttttcctctagcggatcctatccacatttcgtgaatgaaccgattaagctctgacgagatttccttgttttctgtagatacctcttgtagaggtgtcaaagttatgttgtgatcgagagagttacctgcaaggtattatgcaagcggcttgatgaggacactcaactacgtgtgagtaggagtgcgttgctcagcagttgacgcgtgagccgcttgagcagcttgataaaggtcctaatcgtcttccagctgttggcagacgacaatgtgctgtagtagtaggataggcccgtaaaagtgtagaagcaataggttgagactgactgtaatgggtacttgcgttcaaagactgaaagtccaaaggattgctcaaaggcccctgaggtctgagcctctgagcgcgctcttcgtcaaaattcgccggggccatcggtcatcctctcgagggcagcatcttcctgcttgaagactgagtccgtctcaggcttgctggtcacattattgtcagtacctaccatgaagaattcaatattattttacattgtcaaccattacatggatcccatgttgtgcatagcctctatgtcatcctttggtcttttatgtctgtagcgtgctagtagtattcaagttgtagcactgctgtgaaacagtacgttcaagtagtgtgcagcagtacgttcagttagtggactggggcagcctcgccttcagcaaaggttaggtacatgagccagttgctcactcttgctttctacgaatcccataggctactttgccccctaaccgtgacgaccccctgtgtttgagaagtttgagtctttttacgttaccgtgaccaagcgagcagagtagaaactcttgaagttgtgtatgtaagaatacaaattgagaacacaaggttacctacctttatagttggtaaacagcaagcaataccagagatttt

SEQ ID NO: 185 - DNA, 1536 bp, synthetic construct
  source 1..1536: mol_type = other DNA
gcgaggagtagttactaggtagcggtatagcaattccgcccataatgcataaccgttctccctaccaaaacaaaacaatggctacgtggccggcgtgcgtggccgacatggtgcgggtgcggggggcggggtacgagtgtggggagttcactagttcgctggctagctgactagctgaccggcgtgtggttgtggcagtacgcagtgggaaagattaaatatgaaatattgaatatcaaaatgacgtttggggtggcacgtgcgcgcgccaacaacaacaagagcagccaccaagccaaagcaccaagcaccaaccccgcacaccattttgttacacccgcggcagaaatggcgtcagccagcagtcactattactcaatattcaataggggttccacttgactcacttcctcatgtatatatatatccatctaatcttcccaatacataaccccccccctccgaagcgacacctccttctactgcactactgacagtcaaacaccttataacttcgtataatgtatgctatacgaagttatcctgcaggagctcagaccttgcatgttagccttgaccttgcctctatgaccactaattcgcacaagattgcacgttaccattgtcatcttgccatgtatccaatgtttcctgtttgccatagtacgtagtagatacatcgatcatcgatgcagatgacgcagatggcattggttcgctttgccctatgcatccatcatgcatcatgcatcatgcatcatgcgtcactatccatattaatcattgccctctgtactaggccatgacacctgcagacccttccccagggatgcttcttgtaatagccaatatactacacaactttaccgattacgatcgagatcgatctcactatagtttgtcgaacttcgatgcacatcgagggtgcggaaaaaagctgacggaagcggaagtgggtgaattggttaatttagttagattggcagggttgttcccaagattcaacgcaagctgagaaagaaaacagaaacacgaggcataaggccagtcagaaaatgcattacgaggggagttgaagtgactgtgggccagtgcctgggtcgtcatgtgcaaattttttcttcggttagactgccgcagcatgcagcaactctgccggccctatataactagtgcttcatcttcttgtcattcttgtctctttaccaacacaccggtactctttcaccatggcaaagttgacgagcgccgtgccggtgctaaccgcgagagatgtagccggcgctgtagagttttggacggataggttgggtttcagtcgagacttcgttgaagatgactttgcaggcgtcgtgcgtgatgatgtgaccctgtttatctcggccgttcaagatcaagttgtccctgacaatacacttgcatgggtctgggtacgcggattagatgaattgtacgcggaatggtctgaagttgtatccactaactttcgtgacgcttcaggtcctgctatgactgagattggtgaacaaccctggg

SEQ ID NO: 186 - DNA, 4533 bp, synthetic construct; identical to SEQ ID NO: 77
  source 1..4533: mol_type = other DNA

SEQ ID NO: 187 - DNA, 3968 bp, synthetic construct
  source 1..3968: mol_type = other DNA
cttaaacacggcaagggtagcgttgcaaacgacgtaaccgacgaaatggtccgtctgaattggctaactgagttcatgccactccccaccatcaagcacttcatccgtacacctgacgatgcgtggctgttgactacggccatccccggtaagaccgcttttcaggtcctcgaggaataccctgactctggcgagaacatcgtggatgccttggctgtgtttttgcgccgccttcactctattccggtctgcaactgccctttcaacagcgaccgtgtttttaggcttgcccaggcacaatcacgcatgaacaatggtctagtcgacgctagtgatttcgatgacgagcgcaacggctggccggtggaacaagtgtggaaagagatgcataagctcctgcccttttccccagactctgtcgtgacgcatggtgatttctcgcttgacaacctcatctttgacgagggcaagctcattggctgcattgacgtcggccgggttggcatcgccgatcgctaccaagatcttgcgatcctctggaattgtctgggcgagttctcccctagcctccagaagcgtctgttccagaaatatgggatcgataacccagacatgaacaagctccagttccatttgatgctggatgaatttttctaatggtgttcaccactgttgcttcccctttgttggagcgtccgtcgttctgatggcgctctgagcccaaaatatcccttcttcgcccgagagcaagcctcggagtgtgcttgcaatctacttttcctactaaagttatcttcttgtggcttctgaatttgaatagaacgtgttcagacttgttagctaaatttgttgatgcgagatacttgacagaatcccgttgatgaactcatctgtgtgaccaccgcctggtgatggaatctcgcgcggaagccgtggtgttactgactctcaagcaattcagtagataaatttgtataacatcattgcaaggggtgctagcaatcaattgtccaataccaaacggcggcaagtgcaaaggggcgatagagagtttctgcgaggaagggaaggaatccgtatgcctgaaaacttttgtacaagtgtctttgtaagggcgaggtctgctctgacatctctctgagatctgagatctgatacctgcaggataacttcgtataatgtatgctatacgaagttatgtcacagtatcggcatctctgtctcgacgacagtgagtatagtcaactatgctatctagtagccaaagtaagtctacattccgggctttgcaggggttagctatttcattagacaatacttacaaccttcgaagggcttccccagaattcaattctatattgattcaatatccacccatcggacccgctctccgtaccccctgttcgcttcgccactacaaccatgtcaagacctgagaatcgtagcaaattgccccactacggcccgagtgctgtcggctggttaaagtagaatgacttgggtagccagatcgagacgcctgacattgatacgcagacagcgcagtcagtttcaaactgacaactgacgcgtactggattgacaggactccttggccggtgccattcgaatcgcttgtagacctcttgccagcatcttgccagagaagcttgaaggctggatcgctcagcctgagctcacacttagtagctccactagtcactcaggtgctcagcctctcctcagcgcctcaagctcaagcctcagggcctcagctgcatcgagctctggtgccagtgccagtgccagtgccagtgccagtgccagtgccagtgccagtgaagagagtggtatgagccaagctatacccaaaagcaaatgatggttattgccagcttccatgcacccctggggcgaaggacaacgaacaacagacagagtttgaattattcactggcctagtactaccaatttaaatttggtggttcagcgcaggaacggcgcgagtgagcgtaagggcaaactccgcatggggcgtgacgtcagtgtccctctggctgaggcactccagcaggctctggtcaacgcatcaacgtgtgtgtgtgtctaccaagcacattgtgcgctcgctgtccgtgcgccgaaatcgcaccagtcagaacgtctataaaacccctcttgcttggagggttaccgggccgtcttttcccaacgctccggctcactcactactctacacaacaaatggccgaattttccgctgatttgtgcctcttcgaccttgacggaactatcgtctcgactaccgttgcggcagagaaggcgtggaccaagctctgctacgaatacggtgtggatccgtcggaactgttcaagcattctcacggtgcccgcacccaggaagttctccgtcgcttctttccgaaactggatgataccgataacaaaggagtgcttgcacttgagaaggatattgctcattcctatctcgacaccgtgtcccttatccctggagccgaaaacctccttctctccctggacgtcgatacagaaactcagaagaaactgccagaacgaaaatgggccattgtcacctccggcagcccctacctggccttctcctggttcgaaactattcttaaaaatgttggcaagcctaaagtctttatcacgggatttgacgtcaagaacggcaaacccgacccagaaggttactctcgtgcgcgagatttgttgcgacaggatctgcagttgaccggaaaacaggatttgaaatatgtcgtcttcgaagacgctcccgttggtatcaaagccggcaaggcgatgggcgccatcacggtcggaatcacttccagctacgacaagtctgtcttgtttgatgcgggtgctgactacgtggtttgcgatttgacacaggtttccgttgtcaaaaataatgagaacggcattgtgattcaagtcaataacccgttgacacgtgcttaacatggtctgagccgcccacgattccttccttcatgagcgtatgacgacccttttacttagcatgtgcctctaaagaatacgttttgcatacccacatattcgtaaccctgtcctctatagcttctacaggtcatagtcactggctgccagtataaacgtgtcaatatctaatcctcataagatgcctcgctctgtcgtccacaataaaattcagtaacgcaaggactgcgcgactgagtgattgccgatgatatgagaaaactaatttcaagccatttgaacttcaataaatgcttccgctaacatcacggatcatcgatcatcaaccagcctccattaataggcctgccaccactcgcgcaatcatgaatctgatcatacctggctagcgattctcataacaccagaattacctgcccattaaagaaaccctattctgcctgtaacccggcaccagccggtccgaattcacgacagactaaggctctcgcgcagcttgaagactgagtccgtctcagattgttgcatcgtctcatcagatcgtccttcattgtagtgataattggtgcaaccttgtattagactgtatagcagaatccctcgctataaaaagtattatgcatacgcagttccaagcaggaattagtatggtagtgggacttggctgaagggctgacgacatggcgagaaaaacgtatcaattcggaacacactgtgcaatgtcgatcacgttttcggtggttcacggtaggcttcctagtccatgggaaagtggtaacatctatcccttgagcgcttgagcttaatgttaccttgtgcaaaagtcatttgaagcttcacttgaagcttgaagctttgaagttttgaagcttgaagcgcaaacagcagcggtacatgtatactggcgtaacctgcctacagtggtgcatcagtacgtcaagcgggtagcccgaaatctcattaaggtcatttgccctctaagcttagtacctagtgatctgttc

SEQ ID NO: 188 - protein, 246 aa, Saccharomyces cerevisiae
MAEFSADLCLFDLDGTIVSTTVAAEKAWTKLCYEYGVDPSELFKHSHGARTQEVLRRFFPKLDDTDNKGVLALEKDIAHSYLDTVSLIPGAENLLLSLDVDTETQKKLPERKWAIVTSGSPYLAFSWFETILKNVGKPKVFITGFDVKNGKPDPEGYSRARDLLRQDLQLTGKQDLKYVVFEDAPVGIKAGKAMGAITVGITSSYDKSVLFDAGADYVVCDLTQVSVVKNNENGIVIQVNNPLTRA

SEQ ID NO: 189 - protein, 246 aa, Saccharomyces cerevisiae
MPQFSVDLCLFDLDGTIVSTTTAAESAWKKLCRQHGVDPVELFKHSHGARSQEMMKKFFPKLDNTDNKGVLALEKDIAHSYLDTVSLIPGAENLLLSLDVDTETQKKLPERKWAIVTSGSPYLAFSWFETILKNVGKPKVFITGFDVKNGKPDPEGYSRARDLLRQDLQLTGKQDLKYVVFEDAPVGIKAGKAMGAITVGITSSYDKSVLFDAGADYVVCDLTQVSVVKNNENGIVIQVNNPLTRD

SEQ ID NO: 190 - protein, 363 aa, Pichia stipitis
MTANPSLVLNKIDDISFETYDAPEISEPTDVLVQVKKTGICGSDIHFYAHGRIGNFVLTKPMVLGHESAGTVVQVGKGVTSLKVGDNVAIEPGIPCRFCDECKSGHYNLCPHMAFAATPNSKEGEPNPPGTLCKYFKSPEDFLVKLPDHVSLELGALVEPLSVGVHASKLGSVAFGDYVAVFGAGPVGLLAAAVAKTFGAKGVIVVARSDRKLKMAKDIGAATHTFNSKTGGSEELIKAFGGNVPNVVLECTGAEPCIKLGVDAIAPGGRFVQVGNAAGPVSFPITVFAMKELTLFGSFRYGFNDYKTAVGIFDTNYQNGRENAPIDFEQLITHRYKFKDAIEAYDLVRAGKGAVKCLIDGPE

SEQ ID NO: 191 - protein, 256 aa, unidentified
  source 1..256: note = Rhodobacteraceae bacterium
MYAELFRLDGRTAFVTGGSRGIGLACAEALGEAGATVALSSRSRDEGEAAAAALQGKGIRAIYLPADLSTEKAAQEAVRRAADELGGLDILVNNAGIARHCDSLALPPETWDEVIATNLTGLFWCCRAALERMVAAGRGSIVNVGSISGFISNLPQNQVAYNASKASVHMLTKSLAGEFAQQNIRINAVAPGYIETAMTRGGLDDPEWSKIWLGMTPMRRSGTPSEVAAAVLFLASDAASYITGSVLTIDGGYTIH

SEQ ID NO: 192 - protein, 352 aa, Bemisia argentifolii
MASDNLSAVLYKQNDLRLEQRPIPEPKEDEVLLQMAYVGICGSDVHYYEHGRIADFIVKDPMVIGHEASGTVVKVGKNVKHLKKGDRVAVEPGVPCRRCQFCKEGKYNLCPDLTFCATPPDDGNLARYYVHAADFCHKLPDNVSLEEGALLEPLSVGVHACRRAGVQLGTTVLVIGAGPIGLVSVLAAKAYGAFVVCTARSPRRLEVAKNCGADVTLVVDPAKEEESSIIERIRSAIGDLPNVTIDCSGNEKCITIGINITRTGGTLMLVGMGSQMVTVPLVNACAREIDIKSVFRYCNDYPIALEMVASGRCNVKQLVTHSFKLEQTVDAFEAARKKADNTIKVMISCRQG

SEQ ID NO: 193 - protein, 361 aa, Beauveria bassiana
MASRLTPIVRTATRRCAAARMCQSLVALRALHDGPPRRNKPGSHSQTDSDIEIPFPPEDELPSDPVRRAGGQYVKPTLQTFSLDKKVGLVTGGARGLGLVIAQGMVYSGADVALVDMNSKLTQKLGGSFTSADIPTEEEAEKQTKNLVKAFMRENPNAARVPKVTAHFSDVSDPASVDACIAEVIEQHGKIDNLVTSAGFTENYEAVNYPIDRLRKLWAVNIDGTYLFATSVARHLMERKAPGSMVLIGSMSGSIVNVPQPQTPYNVSKAGVRHLASSLAVEWADANIRVNCLSPGYMMTALTAKILDENPELKKKWVSLIPMGKMGDPGDLMGPVIFLLSENSKYVNGIDLRVDGGYTLT

SEQ ID NO: 194 - protein, 278 aa, Pichia stipitis
MDYSYANVVPNFRLDGRLAIITGGSGGLAAVISRALLAQGADVALIDMNLERTKSAAKEVLGWGEETLKGEHASAIGQVSAWSCNIGDAEAVDATFSSINEHHGKIADLLINTAGYCENFPAETYPATNAESIMKVNGLGSFYVSQSFARPLIQNNLRGSIILIGSMSGTIVNDPQPQCMYNMSKAGVIHLVRSLACEWAKYNIRVNTLSPGYILTPLTRNVISGHTEMKEAWESKIPMKRMAEPKEFVGSILYLASETASSYTTGHNLVVDGGYECW

SEQ ID NO: 195 - protein, 281 aa, Candida albicans
MDSAYWSYDNIVPSFRLDGKLVILTGGSGGLAAVVSRALLAKGADVALVDMNLERTQQAARDVLQWGEEQMKGKYESPIGQVSAWSCNIGDAEAVDLTFKAINEHHGKISSVLVNTAGYAENFPAEEYPAKNAENLMKVNGLGSFYVSQAFARPLIQNNMTGSIILIGSMSGTIVNDPQPQCMYNMSKAGVIHLARSLACEWAKYNIRVNTLSPGYILTPLTRNVISGHTEMKTEWESKIPMKRMAEPKEFVGSILYLASESASSYTTGHNLVVDGGYECW

SEQ ID NO: 196 - protein, 361 aa, Kwoniella heveanensis
MSVFRSTLSTARALSARPTFCAPSRAAGAGSIRAYSTPTKVVRKDEKGDPLEEHRVEVEPKLAAIDETITFEHPKKWGKHPGHDMTKGDFGRHTKRTLASFSMDGKVCLVTGAARGLGNMMARTFVESGANAIVLVDLKKEDAERAAEDLVKWFVENGEAEEGEIQALGLGCDVSDEASVASVFATVKEKFGRLDAVVTAAGIVENYVAHEYPTQKIKKLLDINIMGTWYCALEAAKLMPEGGSITLVGSMSGSIVNVPQPQTPYNFSKAGVRHMARSLAVEWATKGIRVNCLAPGYTLTNLTKVILDANPVLRDEWLHRIPMGRLADPSDLKGAVIYLASDSSKYTTGAEIVVDGGYTCL

SEQ ID NO: 197 - protein, 282 aa, Candida maltosa
MDASSYWSYENIVPSFRLDGKLVILTGGSGGLAAVVSRALLAKGADIALIDMNIERTEQAARDVLQWGEEQMKGKYESPIGQVSAWSCNIGDAESVELTFKAVNEHHGKIASVLINTAGYAENFPAEEYPAKNAENIMKVNGLGSFYVSQSFARPLIENNLTGSIILIGSMSGTIVNDPQPQCMYNMSKAGVIHLARSLACEWAKFSIRVNTLSPGYILTPLTRNVISGHTEMKNEWESKIPMKRMAEPKEFVGSILYLASDSASSYTTGHNLVVDGGYECW

SEQ ID NO: 198 - protein, 273 aa, Moniliella pollinis
MSYDANGNLKYSDAKFVFLTDFDGTITLLDSNDHMVDNYGMGYTERRKINEAIVSEQISYRDGFRKMVESVHEPFSEMEALVRRDVTLDPGFKDFHAFAKANDIPIIVVSSGMTPVIRSIFANLIGDEEASKIDVISNEVKFTDPEGKGKTWELVYRHPDNHYGHDKSLSILPYRDLKTRPTLFFAGDGISDMSAATHADVLFVKDKPDNDLGRYCDRKGYPYKLFKDWTEIKAAVQSIIEGQAQPKEIMTDLGKTTGKTPEQLEQEFKKPIA

SEQ ID NO: 199 - protein, 273 aa, Moniliella pollinis
MSYDDAGQLKYSDAKFVFLTDFDGTITLLDSNDHMVDNYGMGYTERRKINEAIIHEQISYRDGFRKMVESVHEPFSEMEALVRRDVTLDPGFKEFHQFAKQHHIPIIVVSSGMTPIIRSIFANLVGDEEASKIDVISNDVKFTDPEGKGKTWELVYRHPDNHYGHDKSLSILPYRGLVNRPTLFFAGDGISDMSAATHADVLFVKDKPDNDLGRYCDRKGYPYKLFKDWTQIKAAVESIIDENAEPQEIMTDLGKTTGKTPEQLEEEAQKHAA

SEQ ID NO: 200 - protein, 253 aa, Moniliella pollinis
MVTEIEVDAVLFDMDGTLIDSTPAVNQTWAEYIERYNLDFDYVMSHCHGCRTVESLKNIVGLPDDQLEQGVVEFEGRISELAEEAARTNGPGQIVALPGAKELLAQLNKGSEQPGRRPGWAIVTSATKAYAYVGFRASGVNGTEFPRAFVTGDNVSKGKPDPEPYLLGAKTLQPPADPKRCLVIEDAPPGIRSGVAAGAKTLGLTTTHAENLMWQAGANWVVPDLSSVSARWEGEGADARLFIRIENSGQRPE

SEQ ID NO: 201 - protein, 241 aa, Saccharomyces cerevisiae
MVKAVIFTDFDGTVTLEDSNDYLTDTLGFGKEKRLKVFEGVLDDTKSFRQGFMEMLESIHTPFPECIKILEKKIRLDPGFKDTFEWAQENDVPVIVVSSGMKPIIKVLLTRLVGQESIHKIDIVSNEVEIDAHDQWKIIYKDESPFGHDKSRSIDAYKKKFESTLKAGEQRPVYFYCGDGVSDLSAAKECDLLFAKRGKDLVTYCKKQNVPFHEFDTFKDILASMKQVLAGEKTVAELMEN

SEQ ID NO: 202 - protein, 237 aa, Lachancea dasiensis
MVNAVIFTDFDGTVTWQDSNDFLTDTKGFGKEERSKVFEGVLDGTKSFRDGFWDMLESVKTPFPECVKLVEENIQLDPGFKDTFEWAQENGVPIVVISSGMRPLIKALLARLVGPEAIEKIDIVSNEVEIDSDGQWRIVYKDDSSFGHDKSKSITAYKKQFEAAGKKPTYFYCGDGVSDLSAAKECDLLFAKRGKDLVTYCKREHVPFHEFDTFEDILSSMKDVLAGKKTVTELMQN

SEQ ID NO: 203 - protein, 240 aa, Tetrapisispora blattae
MVKAVIFSDFDGTITLQDSNDFLVDNKGMGKNDRLKLFEGVLNGTKNFRDIFSDMLGSLNLTQEEGIEFLKENIELDPGFKKTFLWAQENNVPLIVVSSGTVPVIRALLTKMIGSDIEKLDIVSNDLEVNESNHWTVLYRDSTPHGHDKSKTIDDYKSKYESQLVEGEERPVYFYCGDGISDLTAAKECDLLFAKAGKDLITFCKKQNVPYHEFNTWDDILRSMKAVLNGEKTVKELMEN

SEQ ID NO: 204 - protein, 241 aa, Saccharomyces pastorianus
MVKAVIFTDFDGTVTLEDSNDYLTDTLGFGKEERLKVFEGVLDGTKSFRQGFMEMLESIHTPFPECIKILEKKIRLDPGFKDTFEWAQENDVPVVVVSSGMKPIIKVLLTRLVGQHSIHKIDIVSNEVEIEAHDEWKIIYKDESPFGHDKSRSIDAYKKKFESALKPGDERPVYFYCGDGVSDLSAAKECDLLFAKRGKDLVTYCKRQNVPFHEFDTFEDILASMKQVLAGEKTVTELMEN

SEQ ID NO: 205 - protein, 241 aa, Kazachstania africana
MVKAVIFSDFDGTITWQDSNDYLTDTLGFGKEERLKIFEGVLDGTKPFREGFTQMISSIETPLPECLAILKEKIQLDPGFKKTYEWSLEHSVPLIVVSSGMKPIIKALLENMLGEEAIKNLEIVANDVELDANNKMTVTYRDETPFGHDKSKSIDNFKAHYEAQLPEGAEKPTYFYCGDGISDLSAAKECDLLFAKRGKDLVTYCKRQNVPFHEFDTFEDILRSMNQVLDGEKTVSELMEN

SEQ ID NO: 206 - protein, 257 aa, Podospora comata
MGSTLDIALPALKTKPKFIFFTDFDGTITQQDSNDWMTDNLGFGAELRKKGNEDVLFGRRDFRDSFADMLDSIKTPFNECIELLLKNITLDPGFKQFFEWAKENNVPIVILSGGMEPVIRALLAHMLGKEEAETLQIVSNDVAPRPGKSVNEAGGWHIVYHDDSGFGHDKSLEIRPYARLPAEERPVLFYAGDGVSDLSAAKETDLLFAKSGRDLVSYCERENVPFTTFQDFTEILATVKDIVAGKTTVKEAATGRK

SEQ ID NO: 207 - protein, 252 aa, Geotrichum candidum
MSTSTTPAPAVNGTPALKTNPKYIVFTDWDGTVTLQDSNDHMTHNLGFGYEKRIALNDRILDGSISFRDAFQEMLDSIHTPFPECIDYLLKEIQLDPGFPDFYKWAKANNIPIVVVSSGMKPIIHALLVKLVGKTAADDIEIISNDVAIKEDGSWDIVFRDESDFGHDKSRCIRPYTAISDRPTLFYCGDGVSDLSAARETDLLFAKEGKDLITYCKREHIPYTTFASFKDIHSKIQNIVEGKKTVKESQDN

SEQ ID NO: 208 - protein, 238 aa, Ogataea haglerorum
MSPPAIVFTDWDGTVTLQDSNDVLTDNLGFGYEKRKVLNDRMLNETLSFREGFDEMLRSIPANGHSFQECVDYLLQHIKLDPGFKEFYYWCHENGIPIYVISSGMSPIIEALLKKLLGQQVMNHVTIISNGVEINGNDWHIVYRDDTPFGHDKAASIKQCLMNYDLSKKPYLFYCGDGVSDLSAAKSCDLLFARRGKDLVTFCIKQKIHFTQFDTFRDILSDIQKIVSGEKKLEDCFE

SEQ ID NO: 209 - protein, 243 aa, Debaryomyces fabryi
MSGPPAIVFTDWDGTVTLQDSNDYLTENLGFGKPRRLEINDEILNERVSFQEGFTEMLKSIPTPFPECIEYLLKHIQLDPGFKDFYHWCFERNIPVIVISSGMKPIIHALLKNLVGDEAIKNIEIISNEVDVKADGSWNIVYKDPETSFGHDKSKSIREYLERNGYSSQNVPLLFYCGDGVSDLSAAKETNLLFAKHGKDLITYCNRENIPYTEFNSFEDILSKVTKIVEAKGKNINEFLENH

SEQ ID NO: 210 - protein, 267 aa, Monilinia fructicola
MGSTTTTLPAMKTSPKYVFFTDFDGTITTRDSNDFMTDNLGFGQELRKQGNRDVLDGRKTFRDSFQSMMDSIKTPYSKCIETLIENIKLDPGFKEFYEWARENNIPVVILSGGMEPIIRALLEHLLGKKEAAEIQIVSNQVEVRKGFKSLDEEGGWNIVYHDESHFGHDKSREIRPYAELPDDQRPTMFYAGDGVSDLSAAKETDLLFAKKGHDLITYCVREKVPFTIFEDWTSILSTVQDVVAGKTTVKEVYAAGIKDFEQGADKA

SEQ ID NO: 211 - protein, 254 aa, Nadsonia fulvescens
  source 1..254: note = Nadsonia fulvescens var. elongata DSM 6958
MGDSSFLSLPAMQTSPQSIVFTDWDGTVTLEDSNDFLTDNLGYGVERRKWLNQQVLEGKWTFRDSFMDMLQSINTPLPECIAYLKQHVKLDPGFLAFYTWCKSHNIPVIIVSSGMTPIIRALLEDLVGMDAALDIQIVSNDVAIDDAGKWKIVYRDDSPFGHDKSLAIKPYANLDPAVRPTLFYCGDGVSDLSAARETDLLFAKKGRDLVTYCERENIAYNVFDSFADIHKRVKAIVEDNSLTLEQAVAQKEIL

SEQ ID NO: 212 - protein, 211 aa, Actinomadura macrotermitis
MLLPCDGVLFDVDGTLVDSTPLIERAARVWAPEYGIDPDAYLARAHGRRTSDSIADFLPAGQVRAATERLDALEAAEVAGVTALPGVVDLLSSLRGLPWAVVTSMDPGQLTARAGAAGVPLPKVAVTARDVAAGKPDPAGYLLAARRLGLDPARCVVVEDAPAGVAAGRAAGATVVALTTSHSRADLAEADVIVPDLTAVTAEPGGLRVRA

SEQ ID NO: 213 - protein, 216 aa, Escherichia coli
MRCKGFLFDLDGTLVDSLPAVERAWSNWARRHGLAPEEVLAFIHGKQAITSLRHFMAGKSEADIAAEFTRLEHIEATETEGITALPGAIALLSHLNKAGIPWAIVTSGSMPVARARHKIAGLPAPEVFVTAERVKRGKPEPDAYLLGAQLLGLAPQECVVVEDAPAGVLSGLAAGCHVIAVNAPADTPRLNEVDLVLHSLEQITVTKQPNGDVIIQ

SEQ ID NO: 214 - protein, 231 aa, Wickerhamomyces ciferrii
MSKSITLDADIIEFDLDGTLVYTTSVVEKLWSELAIQHGVDPHTVLNDSHGARTSETFAKYFPMIDNTDNKAVEKFEKDIPDNYGHLVKIIPGTIELLNGIDKDRWCIVTSGSNYIANSWFNGILKDVQKPKVFITAELVTNGKPDPEGYLKGDKILSESLGITSEHKKIVFEDAPMGVKAGVASGAIVIGVNSGNNAKLLYESGASYVVKDLTDIKVLDANKVSLEVRYD

SEQ ID NO: 215 - protein, 249 aa, Candida maltosa
MSTSLPPAIVFSDWDGTITLQDSNDYLTDNIGMGYDNRMVINDKILEGTESFRDGFREMLESITKPFDECIEILLKNVTLDPGFVKYYEFCQSKNIPIIVISSGMKPIIRALLEKLIGPEGIKNIEIISNDVRVDGDNWEILFKDPESSFGHDKAKSIKDYLDAHGYAGDADTKRPLLFYNGDGVSDLSAAKETDLLFAKHGKDLIKYCIREKIPYTEFNDFEDILSKMKKIFDGEKEIKDFVENPTVV

SEQ ID NO: 216 - protein, 188 aa, Paenibacillus sp.
MKKPIIAVDMDDTICHLVRRAIYHNNINFPTHPLRYEDMTHWDTSHLRHPESTHDVFYGRPGLFEELELYDEYVVDEMQKLNEAYDVIIVTAADPKTVVEKWNWLQRHMPFITAEQFITCKRKNLINFDLLIDDGAHNLIPAWKAGKKVICIPHPWNGSEREQYPFPLMSSWKGAKAYIDDLFETASG

SEQ ID NO: 217 - protein, 214 aa, Escherichia coli
MAMIFNAKGFLFDMDGTLVDSTAVVESVWRDFCAEYGLDTQAVIAYAHGRQTIDTLTHFIGAGEKTNKIAASLEEVEINTTEGVTEVKGAAALLSKLPPDSWALVTSAGRMLAENRMKAANLPLPIVMVCAEDVMTGKPSPEGYIKAALALGLEPGECVVFEDASAGIKAGLASGASVIAVQPDALGSSEAHAVSELSDIMVKISGERFNIICG

SEQ ID NO: 218 - protein, 219 aa, Mycolicibacterium smegmatis
MTSHKTFPIAGILFDSDGVLVDSHEAAATAWNHWARTWAPGFDFHRDAQHGRRLSDVVAELVGDGDSALATKVLTELEIEMATEVPAMAGAVDLLSSSPADRWAVVTSGAREMAAARLLSAGLPTPRVLVSADDVTAGKPAPEPYLTGAHLLGLEPRVCAVFEDAHLGILAARAANVGFVVGVGAQTIGEDVDVSVADLSGITFDGSHLVIEADAVLTR

SEQ ID NO: 219 - protein, 228 aa, Amycolatopsis sp.
  source 1..228: note = Amycolatopsis sp. CA-230715
MENKIRAELRVRALLLDLDGTLVDSHAVTRRSWQRWAEAVGVPLESFFHRTHGRPGHEVMAEVLPRRSAAENLADSQALLGYELNDTDGVRALPGAARLLASLDDMPWAIVTASTKPLARAKLAAARLPVPDVLVTAEQVDAGKPDPAGYLLAARRLGVDPMWCAVVEDASAGVRAAIAAGMPVLGVGGPVDPMPTWDLAGLDDLEALPDGVLIRLVGSLAPANGAPV

SEQ ID NO: 220 - protein, 216 aa, Streptomyces smaragdinus
MTRERVQSDFGKYVLFDVDGTLIDATDNQRRVWKTWAGRYGLDPDAVHELALRTRPMETFAEVAPDRDPQECLAVLHELEDEDVRSGVYGAFDGASELLSALPPGCWGLVTSNYEHRVRGRFARTGLPVPGVVVDAAAVDEGKPSPVPYLLAAGRLGAEPEDCLVVEDAPSGVESGRRAGMTVWGVNTPGGVDGVHRHFTSLREAVPDILAFVAGG

SEQ ID NO: 221 - protein, 253 aa, Moniliella pollinis; identical to SEQ ID NO: 200

SEQ ID NO: 222 - protein, 265 aa, Bacillus amyloliquefaciens
MAKLDASGFLIDLDGTIFRGQELIDGATEAIHTLQSLGKSVVFLSNRGNLSRAMCRKKLLGAGIRTDERSIVLSSSVTASFLKKHYPLSKVWVLGEKGLTDELALAGVTMAQKPQAADWLVISLHETVTYEDLNLAFKAASSGARIIATNRDRSFPNEGGHAMDVVGMIGAIEASAGAKTELVVGKPSWLMAEAACEALGLPPVECAIIGDSLESDIAMGRLYGMKSVLVMTGSAKLGVPRLYEPDIVLDSIKDLTELAKEGILL

SEQ ID NO: 223 - DNA, 3718 bp, synthetic construct
  source 1..3718: mol_type = other DNA
agatgtagccggcgctgtagagttttggacggataggttgggtttcagtcgagacttcgttgaagatgactttgcaggcgtcgtgcgtgatgatgtgaccctgtttatctcggccgttcaagatcaagttgtccctgacaatacacttgcatgggtctgggtacgcggattagatgaattgtacgcggaatggtctgaagttgtatccactaactttcgtgacgcttcaggtcctgctatgactgagattggtgaacaaccctgggggcgtgagttcgcactccgagatccagctggaaattgtgttcatttcgtagctgaggaacaggattaatggtgttcaccactgttgcttcccctttgttggagcgtccgtcgttctgatggcgctctgagcccaaaatatcccttcttcgcccgagagcaagcctcggagtgtgcttgcaatctacttttcctactaaagttatcttcttgtggcttctgaatttgaatagaacgtgttcagacttgttagctaaatttgttgatgcgagatacttgacagaatcccgttgatgaactcatctgtgtgaccaccgcctggtgatggaatctcgcgcggaagccgtggtgttactgactctcaagcaattcagtagataaatttgtataacatcattgcaaggggtgctagcaatcaattgtccaataccaaacggcggcaagtgcaaaggggcgatagagagtttctgcgaggaagggaaggaatccgtatgcctgaaaacttttgtacaagtgtctttgtaagggcgaggtctgctctgacatctctctgagatctgagatctgatacctgcaggataacttcgtataatgtatgctatacgaagttatgtcacagtatcggcatctctgtctcgacgacagtgagtatagtcaactatgctatctagtagccaaagtaagtctacattccgggctttgcaggggttagctatttcattagacaatacttacaaccttcgaagggcttccccagaattcaattctatattgattcaatatccacccatcggacccgctctccgtaccccctgttcgcttcgccactacaaccatgtcaagacctgagaatcgtagcaaattgccccactacggcccgagtgctgtcggctggttaaagtagaatgacttgggtagccagatcgagacgcctgacattgatacgcagacagcgcagtcagtttcaaactgacaactgacgcgtactggattgacaggactccttggccggtgccattcgaatcgcttgtagacctcttgccagcatcttgccagagaagcttgaaggctggatcgctcagcctgagctcacacttagtagctccactagtcactcaggtgctcagcctctcctcagcgcctcaagctcaagcctcagggcctcagctgcatcgagctctggtgccagtgccagtgccagtgccagtgccagtgccagtgccagtgccagtgaagagagtggtatgagccaagctatacccaaaagcaaatgatggttattgccagcttccatgcacccctggggcgaaggacaacgaacaacagacagagtttgaattattcactggcctagtactaccaatttaaatttggtggttcagcgcaggaacggcgcgagtgagcgtaagggcaaactccgcatggggcgtgacgtcagtgtccctctggctgaggcactccagcaggctctggtcaacgcatcaacgtgtgtgtgtgtctaccaagcacattgtgcgctcgctgtccgtgcgccgaaatcgcaccagtcagaacgtctataaaacccctcttgcttggagggttaccgggccgtcttttcccaacgctccggctcactcactactctacacaacaaatggttaaagcagtgatttttaccgatttcgacggaacagtcacattggaggatagcaatgactacctgacggacacgcttggtttcggcaaggaaaaacgtcttaaagtcttcgagggtgtgttggacgatacgaagtccttccgtcaaggattcatggagatgttggagtcgatccacacgccttttcctgaatgtattaagatcttggaaaaaaaaattcgtctggacccgggctttaaagacactttcgagtgggcgcaagaaaatgacgttcccgtcatcgtcgtctcttctggtatgaagccgattatcaaggtgttgcttacgcgtttggtcggtcaggaatccatccacaaaattgacatcgtgtccaatgaagtcgagatcgacgcacatgaccagtggaaaatcatctataaagacgagagccctttcggacatgataagtcccgatccatcgatgcttacaagaagaagtttgagagcacgctcaaagctggagaacaacgccctgtttacttttattgcggagacggcgtctctgacttgtctgctgcgaaggaatgcgacctgctcttcgccaaacgtggaaaggatctcgttacttactgcaagaagcaaaacgtccccttccacgagtttgatacttttaaagatattttggcctccatgaaacaggtgttggctggagagaaaacggttgctgaactgatggagaactaacacggatcaacaaaaatgtgcgccagctttgttgtgtgcccttttcctctagcggatcctatccacatttcgtgaatgaaccgattaagctctgacgagatttccttgttttctgtagatacctcttgtagaggtgtcaaagttatgttgtgatcgagagagttacctgcaaggtattatgcaagcggcttgatgaggacactcaactacgtgtgagtaggagtgcgttgctcagcagttgacgcgtgagccgcttgagcagcttgataaaggtcctaatcgtcttccagctgttggcagacgacaatgtgctgtagtagtaggataggcccgtaaaagtgtagaagcaataggttgagactgactgtaatgggtacttgcgttcaaagactgaaagtccaaaggattgctcaaaggcccctgaggtctgagcctctgagcgcgctcttcgtcaaaattcgccggggccatcggtcatcctctcgagggcagcatcttcctgcttgaagactgagtccgtctcaggcttgctggtcacattattgtcagtacctaccatgaagaattcaatattattttacattgtcaaccattacatggatcccatgttgtgcatagcctctatgtcatcctttggtcttttatgtctgtagcgtgctagtagtattcaagttgtagcactgctgtgaaacagtacgttcaagtagtgtgcagcagtacgttcagttagtggactggggcagcctcgccttcagcaaaggttaggtacatgagccagttgctcactcttgctttctacgaatcccataggctactttgccccctaaccgtgacgaccccctgtgtttgagaagtttgagtctttttacgttaccgtgaccaagcgagcagagtagaaactcttgaagttgtgtatgtaagaatacaaattgagaacacaaggttacctacctttatagttggtaaacagcaagcaataccagagattttcatcgcaacgtgactctatcattcactatattaagttgcacacggatgttgtacaacactacacgtaaaagagagaaaaatactaatgtcgatcgctcaggt

SEQ ID NO: 224 - DNA, 726 bp, synthetic construct
  source 1..726: mol_type = other DNA
atggttaaagcagtgatttttaccgatttcgacggaacagtcacattggaggatagcaatgactacctgacggacacgcttggtttcggcaaggaaaaacgtcttaaagtcttcgagggtgtgttggacgatacgaagtccttccgtcaaggattcatggagatgttggagtcgatccacacgccttttcctgaatgtattaagatcttggaaaaaaaaattcgtctggacccgggctttaaagacactttcgagtgggcgcaagaaaatgacgttcccgtcatcgtcgtctcttctggtatgaagccgattatcaaggtgttgcttacgcgtttggtcggtcaggaatccatccacaaaattgacatcgtgtccaatgaagtcgagatcgacgcacatgaccagtggaaaatcatctataaagacgagagccctttcggacatgataagtcccgatccatcgatgcttacaagaagaagtttgagagcacgctcaaagctggagaacaacgccctgtttacttttattgcggagacggcgtctctgacttgtctgctgcgaaggaatgcgacctgctcttcgccaaacgtggaaaggatctcgttacttactgcaagaagcaaaacgtccccttccacgagtttgatacttttaaagatattttggcctccatgaaacaggtgttggctggagagaaaacggttgctgaactgatggagaactaa

SEQ ID NO: 225 - DNA, 3814 bp, synthetic construct
  source 1..3814: mol_type = other DNA
agatgtagccggcgctgtagagttttggacggataggttgggtttcagtcgagacttcgttgaagatgactttgcaggcgtcgtgcgtgatgatgtgaccctgtttatctcggccgttcaagatcaagttgtccctgacaatacacttgcatgggtctgggtacgcggattagatgaattgtacgcggaatggtctgaagttgtatccactaactttcgtgacgcttcaggtcctgctatgactgagattggtgaacaaccctgggggcgtgagttcgcactccgagatccagctggaaattgtgttcatttcgtagctgaggaacaggattaatggtgttcaccactgttgcttcccctttgttggagcgtccgtcgttctgatggcgctctgagcccaaaatatcccttcttcgcccgagagcaagcctcggagtgtgcttgcaatctacttttcctactaaagttatcttcttgtggcttctgaatttgaatagaacgtgttcagacttgttagctaaatttgttgatgcgagatacttgacagaatcccgttgatgaactcatctgtgtgaccaccgcctggtgatggaatctcgcgcggaagccgtggtgttactgactctcaagcaattcagtagataaatttgtataacatcattgcaaggggtgctagcaatcaattgtccaataccaaacggcggcaagtgcaaaggggcgatagagagtttctgcgaggaagggaaggaatccgtatgcctgaaaacttttgtacaagtgtctttgtaagggcgaggtctgctctgacatctctctgagatctgagatctgatacctgcaggataacttcgtataatgtatgctatacgaagttatgtcacagtatcggcatctctgtctcgacgacagtgagtatagtcaactatgctatctagtagccaaagtaagtctacattccgggctttgcaggggttagctatttcattagacaatacttacaaccttcgaagggcttccccagaattcaattctatattgattcaatatccacccatcggacccgctctccgtaccccctgttcgcttcgccactacaaccatgtcaagacctgagaatcgtagcaaattgccccactacggcccgagtgctgtcggctggttaaagtagaatgacttgggtagccagatcgagacgcctgacattgatacgcagacagcgcagtcagtttcaaactgacaactgacgcgtactggattgacaggactccttggccggtgccattcgaatcgcttgtagacctcttgccagcatcttgccagagaagcttgaaggctggatcgctcagcctgagctcacacttagtagctccactagtcactcaggtgctcagcctctcctcagcgcctcaagctcaagcctcagggcctcagctgcatcgagctctggtgccagtgccagtgccagtgccagtgccagtgccagtgccagtgccagtgaagagagtggtatgagccaagctatacccaaaagcaaatgatggttattgccagcttccatgcacccctggggcgaaggacaacgaacaacagacagagtttgaattattcactggcctagtactaccaatttaaatttggtggttcagcgcaggaacggcgcgagtgagcgtaagggcaaactccgcatggggcgtgacgtcagtgtccctctggctgaggcactccagcaggctctggtcaacgcatcaacgtgtgtgtgtgtctaccaagcacattgtgcgctcgctgtccgtgcgccgaaatcgcaccagtcagaacgtctataaaacccctcttgcttggagggttaccgggccgtcttttcccaacgctccggctcactcactactctacacaacaaatgtcctacgacgccaacggaaacctcaagtactcggatgccaagttcgtcttcctgaccgactttgatggtaccatcaccttgctcgactccaacgaccacatggttgacaactacggcatggggtacaccgagcgtcgtaagatcaacgaagcgatcgtttctgaacaaatttcttatcgtgatggtttccgcaagatggtcgaaagtgtccatgaacccttcagtgagatggaagcattggttcgtcgtgatgttacgctcgatccagggtttaaagatttccatgcgttcgccaaggctaatgatattccaatcattgtcgtatcgtctggtatgaccccggttattcgttccatctttgccaacttgattggtgatgaggaggctagcaagattgacgtcatctccaacgaggtcaagttcactgatcctgagggtaagggtaagacctgggaattggtctaccgccaccccgataaccactatggtcatgacaagagcctgtcaattttgccctaccgtgacctcaagacccgacctacgttgttctttgctggtgatggtattagtgacatgagtgctgctacgcacgctgatgtcttgttcgtaaaggacaagcctgacaacgatttgggtcgttactgcgatcgcaaaggatacccttacaaattgttcaaagactggaccgagatcaaagctgcagttcagagcatcattgaaggacaagctcaaccaaaggagatcatgaccgatttgggtaagaccaccggtaagacgcccgaacaacttgagcaagaatttaagaagcctattgcttaacacggatcaacaaaaatgtgcgccagctttgttgtgtgcccttttcctctagcggatcctatccacatttcgtgaatgaaccgattaagctctgacgagatttccttgttttctgtagatacctcttgtagaggtgtcaaagttatgttgtgatcgagagagttacctgcaaggtattatgcaagcggcttgatgaggacactcaactacgtgtgagtaggagtgcgttgctcagcagttgacgcgtgagccgcttgagcagcttgataaaggtcctaatcgtcttccagctgttggcagacgacaatgtgctgtagtagtaggataggcccgtaaaagtgtagaagcaataggttgagactgactgtaatgggtacttgcgttcaaagactgaaagtccaaaggattgctcaaaggcccctgaggtctgagcctctgagcgcgctcttcgtcaaaattcgccggggccatcggtcatcctctcgagggcagcatcttcctgcttgaagactgagtccgtctcaggcttgctggtcacattattgtcagtacctaccatgaagaattcaatattattttacattgtcaaccattacatggatcccatgttgtgcatagcctctatgtcatcctttggtcttttatgtctgtagcgtgctagtagtattcaagttgtagcactgctgtgaaacagtacgttcaagtagtgtgcagcagtacgttcagttagtggactggggcagcctcgccttcagcaaaggttaggtacatgagccagttgctcactcttgctttctacgaatcccataggctactttgccccctaaccgtgacgaccccctgtgtttgagaagtttgagtctttttacgttaccgtgaccaagcgagcagagtagaaactcttgaagttgtgtatgtaagaatacaaattgagaacacaaggttacctacctttatagttggtaaacagcaagcaataccagagattttcatcgcaacgtgactctatcattcactatattaagttgcacacggatgttgtacaacactacacgtaaaagagagaaaaatactaatgtcgatcgctcaggt

SEQ ID NO: 226 - DNA, 822 bp, synthetic construct
  source 1..822: mol_type = other DNA
atgtcctacgacgccaacggaaacctcaagtactcggatgccaagttcgtcttcctgaccgactttgatggtaccatcaccttgctcgactccaacgaccacatggttgacaactacggcatggggtacaccgagcgtcgtaagatcaacgaagcgatcgtttctgaacaaatttcttatcgtgatggtttccgcaagatggtcgaaagtgtccatgaacccttcagtgagatggaagcattggttcgtcgtgatgttacgctcgatccagggtttaaagatttccatgcgttcgccaaggctaatgatattccaatcattgtcgtatcgtctggtatgaccccggttattcgttccatctttgccaacttgattggtgatgaggaggctagcaagattgacgtcatctccaacgaggtcaagttcactgatcctgagggtaagggtaagacctgggaattggtctaccgccaccccgataaccactatggtcatgacaagagcctgtcaattttgccctaccgtgacctcaagacccgacctacgttgttctttgctggtgatggtattagtgacatgagtgctgctacgcacgctgatgtcttgttcgtaaaggacaagcctgacaacgatttgggtcgttactgcgatcgcaaaggatacccttacaaattgttcaaagactggaccgagatcaaagctgcagttcagagcatcattgaaggacaagctcaaccaaaggagatcatgaccgatttgggtaagaccaccggtaagacgcccgaacaacttgagcaagaatttaagaagcctattgcttaa

SEQ ID NO: 227 - DNA, 3814 bp, synthetic construct
  source 1..3814: mol_type = other DNA
agatgtagccggcgctgtagagttttggacggataggttgggtttcagtcgagacttcgttgaagatgactttgcaggcgtcgtgcgtgatgatgtgaccctgtttatctcggccgttcaagatcaagttgtccctgacaatacacttgcatgggtctgggtacgcggattagatgaattgtacgcggaatggtctgaagttgtatccactaactttcgtgacgcttcaggtcctgctatgactgagattggtgaacaaccctgggggcgtgagttcgcactccgagatccagctggaaattgtgttcatttcgtagctgaggaacaggattaatggtgttcaccactgttgcttcccctttgttggagcgtccgtcgttctgatggcgctctgagcccaaaatatcccttcttcgcccgagagcaagcctcggagtgtgcttgcaatctacttttcctactaaagttatcttcttgtggcttctgaatttgaatagaacgtgttcagacttgttagctaaatttgttgatgcgagatacttgacagaatcccgttgatgaactcatctgtgtgaccaccgcctggtgatggaatctcgcgcggaagccgtggtgttactgactctcaagcaattcagtagataaatttgtataacatcattgcaaggggtgctagcaatcaattgtccaataccaaacggcggcaagtgcaaaggggcgatagagagtttctgcgaggaagggaaggaatccgtatgcctgaaaacttttgtacaagtgtctttgtaagggcgaggtctgctctgacatctctctgagatctgagatctgatacctgcaggataacttcgtataatgtatgctatacgaagttatgtcacagtatcggcatctctgtctcgacgacagtgagtatagtcaactatgctatctagtagccaaagtaagtctacattccgggctttgcaggggttagctatttcattagacaatacttacaaccttcgaagggcttccccagaattcaattctatattgattcaatatccacccatcggacccgctctccgtaccccctgttcgcttcgccactacaaccatgtcaagacctgagaatcgtagcaaattgccccactacggcccgagtgctgtcggctggttaaagtagaatgacttgggtagccagatcgagacgcctgacattgatacgcagacagcgcagtcagtttcaaactgacaactgacgcgtactggattgacaggactccttggccggtgccattcgaatcgcttgtagacctcttgccagcatcttgccagagaagcttgaaggctggatcgctcagcctgagctcacacttagtagctccactagtcactcaggtgctcagcctctcctcagcgcctcaagctcaagcctcagggcctcagctgcatcgagctctggtgccagtgccagtgccagtgccagtgccagtgccagtgccagtgccagtgaagagagtggtatgagccaagctatacccaaaagcaaatgatggttattgccagcttccatgcacccctggggcgaaggacaacgaacaacagacagagtttgaattattcactggcctagtactaccaatttaaatttggtggttcagcgcaggaacggcgcgagtgagcgtaagggcaaactccgcatggggcgtgacgtcagtgtccctctggctgaggcactccagcaggctctggtcaacgcatcaacgtgtgtgtgtgtctaccaagcacattgtgcgctcgctgtccgtgcgccgaaatcgcaccagtcagaacgtctataaaacccctcttgcttggagggttaccgggccgtcttttcccaacgctccggctcactcactactctacacaacaaatgtcttacgacgatgctggccaacttaagtattcggacgccaagtttgtctttttgaccgactttgacggtacgattacattgctcgattctaatgatcatatggtagacaactacggtatggggtacaccgaacgtcgaaagattaacgaagcaattattcatgaacaaatttcttatcgtgatggcttccgtaagatggtcgaaagtgttcatgaaccgtttagtgaaatggaagcgttggtacgacgtgacgttacgctcgacccaggattcaaagaattccatcaattcgctaaacagcaccatatcccgatcattgttgtttcatccggtatgaccccgattattcgatcaatctttgcgaatttggttggtgatgaggaagcaagcaagatcgatgttatctcgaacgatgtcaagtttaccgatccagaggggaaaggcaaaacatgggaattggtctatcgtcaccctgataatcattatggacacgataaatctctttcaatcttaccgtatcggggtttagtcaatcgtcctaccctcttctttgctggtgatggaatcagtgatatgagtgctgctacacatgctgatgtacttttcgtcaaagataaaccagacaacgatttgggacggtattgtgaccgaaagggatatccgtacaaattgttcaaagattggactcaaatcaaggctgcggttgagagcattattgatgaaaatgcagaaccacaagagatcatgacggatttgggcaagactaccggtaagacacctgaacagttggaagaggaagctcagaaacacgctgcttaacacggatcaacaaaaatgtgcgccagctttgttgtgtgcccttttcctctagcggatcctatccacatttcgtgaatgaaccgattaagctctgacgagatttccttgttttctgtagatacctcttgtagaggtgtcaaagttatgttgtgatcgagagagttacctgcaaggtattatgcaagcggcttgatgaggacactcaactacgtgtgagtaggagtgcgttgctcagcagttgacgcgtgagccgcttgagcagcttgataaaggtcctaatcgtcttccagctgttggcagacgacaatgtgctgtagtagtaggataggcccgtaaaagtgtagaagcaataggttgagactgactgtaatgggtacttgcgttcaaagactgaaagtccaaaggattgctcaaaggcccctgaggtctgagcctctgagcgcgctcttcgtcaaaattcgccggggccatcggtcatcctctcgagggcagcatcttcctgcttgaagactgagtccgtctcaggcttgctggtcacattattgtcagtacctaccatgaagaattcaatattattttacattgtcaaccattacatggatcccatgttgtgcatagcctctatgtcatcctttggtcttttatgtctgtagcgtgctagtagtattcaagttgtagcactgctgtgaaacagtacgttcaagtagtgtgcagcagtacgttcagttagtggactggggcagcctcgccttcagcaaaggttaggtacatgagccagttgctcactcttgctttctacgaatcccataggctactttgccccctaaccgtgacgaccccctgtgtttgagaagtttgagtctttttacgttaccgtgaccaagcgagcagagtagaaactcttgaagttgtgtatgtaagaatacaaattgagaacacaaggttacctacctttatagttggtaaacagcaagcaataccagagattttcatcgcaacgtgactctatcattcactatattaagttgcacacggatgttgtacaacactacacgtaaaagagagaaaaatactaatgtcgatcgctcaggt

SEQ ID NO: 228 - DNA, 822 bp, synthetic construct
  source 1..822: mol_type = other DNA
atgtcttacgacgatgctggccaacttaagtattcggacgccaagtttgtctttttgaccgactttgacggtacgattacattgctcgattctaatgatcatatggtagacaactacggtatggggtacaccgaacgtcgaaagattaacgaagcaattattcatgaacaaatttcttatcgtgatggcttccgtaagatggtcgaaagtgttcatgaaccgtttagtgaaatggaagcgttggtacgacgtgacgttacgctcgacccaggattcaaagaattccatcaattcgctaaacagcaccatatcccgatcattgttgtttcatccggtatgaccccgattattcgatcaatctttgcgaatttggttggtgatgaggaagcaagcaagatcgatgttatctcgaacgatgtcaagtttaccgatccagaggggaaaggcaaaacatgggaattggtctatcgtcaccctgataatcattatggacacgataaatctctttcaatcttaccgtatcggggtttagtcaatcgtcctaccctcttctttgctggtgatggaatcagtgatatgagtgctgctacacatgctgatgtacttttcgtcaaagataaaccagacaacgatttgggacggtattgtgaccgaaagggatatccgtacaaattgttcaaagattggactcaaatcaaggctgcggttgagagcattattgatgaaaatgcagaaccacaagagatcatgacggatttgggcaagactaccggtaagacacctgaacagttggaagaggaagctcagaaacacgctgcttaa

SEQ ID NO: 229 - DNA, 3754 bp, synthetic construct
  source 1..3754: mol_type = other DNA
agatgtagccggcgctgtagagttttggacggataggttgggtttcagtcgagacttcgttgaagatgactttgcaggcgtcgtgcgtgatgatgtgaccctgtttatctcggccgttcaagatcaagttgtccctgacaatacacttgcatgggtctgggtacgcggattagatgaattgtacgcggaatggtctgaagttgtatccactaactttcgtgacgcttcaggtcctgctatgactgagattggtgaacaaccctgggggcgtgagttcgcactccgagatccagctggaaattgtgttcatttcgtagctgaggaacaggattaatggtgttcaccactgttgcttcccctttgttggagcgtccgtcgttctgatggcgctctgagcccaaaatatcccttcttcgcccgagagcaagcctcggagtgtgcttgcaatctacttttcctactaaagttatcttcttgtggcttctgaatttgaatagaacgtgttcagacttgttagctaaatttgttgatgcgagatacttgacagaatcccgttgatgaactcatctgtgtgaccaccgcctggtgatggaatctcgcgcggaagccgtggtgttactgactctcaagcaattcagtagataaatttgtataacatcattgcaaggggtgctagcaatcaattgtccaataccaaacggcggcaagtgcaaaggggcgatagagagtttctgcgaggaagggaaggaatccgtatgcctgaaaacttttgtacaagtgtctttgtaagggcgaggtctgctctgacatctctctgagatctgagatctgatacctgcaggataacttcgtataatgtatgctatacgaagttatgtcacagtatcggcatctctgtctcgacgacagtgagtatagtcaactatgctatctagtagccaaagtaagtctacattccgggctttgcaggggttagctatttcattagacaatacttacaaccttcgaagggcttccccagaattcaattctatattgattcaatatccacccatcggacccgctctccgtaccccctgttcgcttcgccactacaaccatgtcaagacctgagaatcgtagcaaattgccccactacggcccgagtgctgtcggctggttaaagtagaatgacttgggtagccagatcgagacgcctgacattgatacgcagacagcgcagtcagtttcaaactgacaactgacgcgtactggattgacaggactccttggccggtgccattcgaatcgcttgtagacctcttgccagcatcttgccagagaagcttgaaggctggatcgctcagcctgagctcacacttagtagctccactagtcactcaggtgctcagcctctcctcagcgcctcaagctcaagcctcagggcctcagctgcatcgagctctggtgccagtgccagtgccagtgccagtgccagtgccagtgccagtgccagtgaagagagtggtatgagccaagctatacccaaaagcaaatgatggttattgccagcttccatgcacccctggggcgaaggacaacgaacaacagacagagtttgaattattcactggcctagtactaccaatttaaatttggtggttcagcgcaggaacggcgcgagtgagcgtaagggcaaactccgcatggggcgtgacgtcagtgtccctctggctgaggcactccagcaggctctggtcaacgcatcaacgtgtgtgtgtgtctaccaagcacattgtgcgctcgctgtccgtgcgccgaaatcgcaccagtcagaacgtctataaaacccctcttgcttggagggttaccgggccgtcttttcccaacgctccggctcactcactactctacacaacaaatggttaccgagatcgaagtggatgcggtgctgttcgacatggacggcaccctgattgactctacccctgctgtcaaccagacttgggccgagtacatcgaacgatacaacctcgactttgactacgtcatgtctcattgtcacggatgtcgaacggtagagagcctcaagaatatcgttggattgccggatgaccagttggaacaaggcgtagtcgagtttgaagggcgtattagtgaactggctgaagaggcggcacgtaccaatggtcctggtcaaattgtggctttgcccggcgcaaaagaactgcttgcccaactgaacaagggtagcgaacaacctggtcgtcgtcctggatgggccatcgttacttcggcaaccaaggcttacgcttacgtgggcttcagagcgtcgggcgtgaatggtacagaattccctcgtgcttttgtcacgggtgacaatgtcagcaagggcaaacctgatcctgaaccatacctcttgggagcaaagacgttacaacctcctgctgatcctaaacgttgtctcgtaatcgaagatgctcctccaggtattcgatcaggtgttgctgcaggtgccaaaacccttggattgaccactacccacgcggaaaacctcatgtggcaagcgggtgctaactgggtcgtaccagacttatcgagtgtttcggcacgttgggaaggtgaaggtgcggacgctcgtctttttattcgcattgaaaactcaggccagcgtccagagtaacacggatcaacaaaaatgtgcgccagctttgttgtgtgcccttttcctctagcggatcctatccacatttcgtgaatgaaccgattaagctctgacgagatttccttgttttctgtagatacctcttgtagaggtgtcaaagttatgttgtgatcgagagagttacctgcaaggtattatgcaagcggcttgatgaggacactcaactacgtgtgagtaggagtgcgttgctcagcagttgacgcgtgagccgcttgagcagcttgataaaggtcctaatcgtcttccagctgttggcagacgacaatgtgctgtagtagtaggataggcccgtaaaagtgtagaagcaataggttgagactgactgtaatgggtacttgcgttcaaagactgaaagtccaaaggattgctcaaaggcccctgaggtctgagcctctgagcgcgctcttcgtcaaaattcgccggggccatcggtcatcctctcgagggcagcatcttcctgcttgaagactgagtccgtctcaggcttgctggtcacattattgtcagtacctaccatgaagaattcaatattattttacattgtcaaccattacatggatcccatgttgtgcatagcctctatgtcatcctttggtcttttatgtctgtagcgtgctagtagtattcaagttgtagcactgctgtgaaacagtacgttcaagtagtgtgcagcagtacgttcagttagtggactggggcagcctcgccttcagcaaaggttaggtacatgagccagttgctcactcttgctttctacgaatcccataggctactttgccccctaaccgtgacgaccccctgtgtttgagaagtttgagtctttttacgttaccgtgaccaagcgagcagagtagaaactcttgaagttgtgtatgtaagaatacaaattgagaacacaaggttacctacctttatagttggtaaacagcaagcaataccagagattttcatcgcaacgtgactctatcattcactatattaagttgcacacggatgttgtacaacactacacgtaaaagagagaaaaatactaatgtcgatcgctcaggt

SEQ ID NO: 230 - DNA, 762 bp, synthetic construct
  source 1..762: mol_type = other DNA
atggttaccgagatcgaagtggatgcggtgctgttcgacatggacggcaccctgattgactctacccctgctgtcaaccagacttgggccgagtacatcgaacgatacaacctcgactttgactacgtcatgtctcattgtcacggatgtcgaacggtagagagcctcaagaatatcgttggattgccggatgaccagttggaacaaggcgtagtcgagtttgaagggcgtattagtgaactggctgaagaggcggcacgtaccaatggtcctggtcaaattgtggctttgcccggcgcaaaagaactgcttgcccaactgaacaagggtagcgaacaacctggtcgtcgtcctggatgggccatcgttacttcggcaaccaaggcttacgcttacgtgggcttcagagcgtcgggcgtgaatggtacagaattccctcgtgcttttgtcacgggtgacaatgtcagcaagggcaaacctgatcctgaaccatacctcttgggagcaaagacgttacaacctcctgctgatcctaaacgttgtctcgtaatcgaagatgctcctccaggtattcgatcaggtgttgctgcaggtgccaaaacccttggattgaccactacccacgcggaaaacctcatgtggcaagcgggtgctaactgggtcgtaccagacttatcgagtgtttcggcacgttgggaaggtgaaggtgcggacgctcgtctttttattcgcattgaaaactcaggccagcgtccagagtaa

SEQ ID NO: 231 - DNA, 3706 bp, synthetic construct
  source 1..3706: mol_type = other DNA
agatgtagccggcgctgtagagttttggacggataggttgggtttcagtcgagacttcgttgaagatgactttgcaggcgtcgtgcgtgatgatgtgaccctgtttatctcggccgttcaagatcaagttgtccctgacaatacacttgcatgggtctgggtacgcggattagatgaattgtacgcggaatggtctgaagttgtatccactaactttcgtgacgcttcaggtcctgctatgactgagattggtgaacaaccctgggggcgtgagttcgcactccgagatccagctggaaattgtgttcatttcgtagctgaggaacaggattaatggtgttcaccactgttgcttcccctttgttggagcgtccgtcgttctgatggcgctctgagcccaaaatatcccttcttcgcccgagagcaagcctcggagtgtgcttgcaatctacttttcctactaaagttatcttcttgtggcttctgaatttgaatagaacgtgttcagacttgttagctaaatttgttgatgcgagatacttgacagaatcccgttgatgaactcatctgtgtgaccaccgcctggtgatggaatctcgcgcggaagccgtggtgttactgactctcaagcaattcagtagataaatttgtataacatcattgcaaggggtgctagcaatcaattgtccaataccaaacggcggcaagtgcaaaggggcgatagagagtttctgcgaggaagggaaggaatccgtatgcctgaaaacttttgtacaagtgtctttgtaagggcgaggtctgctctgacatctctctgagatctgagatctgatacctgcaggataacttcgtataatgtatgctatacgaagttatgtcacagtatcggcatctctgtctcgacgacagtgagtatagtcaactatgctatctagtagccaaagtaagtctacattccgggctttgcaggggttagctatttcattagacaatacttacaaccttcgaagggcttccccagaattcaattctatattgattcaatatccacccatcggacccgctctccgtaccccctgttcgcttcgccactacaaccatgtcaagacctgagaatcgtagcaaattgccccactacggcccgagtgctgtcggctggttaaagtagaatgacttgggtagccagatcgagacgcctgacattgatacgcagacagcgcagtcagtttcaaactgacaactgacgcgtactggattgacaggactccttggccggtgccattcgaatcgcttgtagacctcttgccagcatcttgccagagaagcttgaaggctggatcgctcagcctgagctcacacttagtagctccactagtcactcaggtgctcagcctctcctcagcgcctcaagctcaagcctcagggcctcagctgcatcgagctctggtgccagtgccagtgccagtgccagtgccagtgccagtgccagtgccagtgaagagagtggtatgagccaagctatacccaaaagcaaatgatggttattgccagcttccatgcacccctggggcgaaggacaacgaacaacagacagagtttgaattattcactggcctagtactaccaatttaaatttggtggttcagcgcaggaacggcgcgagtgagcgtaagggcaaactccgcatggggcgtgacgtcagtgtccctctggctgaggcactccagcaggctctggtcaacgcatcaacgtgtgtgtgtgtctaccaagcacattgtgcgctcgctgtccgtgcgccgaaatcgcaccagtcagaacgtctataaaacccctcttgcttggagggttaccgggccgtcttttcccaacgctccggctcactcactactctacacaacaaatggtcaacgcggttatcttcacggactttgacggtactgtgacctggcaagacagcaacgacttcctcacggataccaagggttttggtaaggaggaacgctctaaggtgttcgaaggcgtgttggacggcaccaaatcgtttcgtgacggattttgggacatgctcgagtctgtgaaaaccccattcccggaatgcgttaaacttgtggaggagaatatccaacttgacccaggctttaaagatacttttgaatgggctcaagaaaatggcgtgcccattgttgtgatcagcagcggaatgcgtcccctcattaaggctcttcttgcacgactggttggaccagaagccatcgaaaagattgacattgttagcaacgaggttgagatcgactctgacggccagtggcgtattgtctacaaggatgacagctcttttggacacgacaagtccaaatccatcaccgcctataagaaacaattcgaagctgcaggtaaaaaaccgacctatttttactgcggtgacggcgtctcggatcttagcgcggcaaaagagtgcgacctgttgttcgctaagcgcggaaaggatctggtgacctactgtaagcgcgaacacgtcccattccatgagtttgataccttcgaggacattctttcgtcgatgaaagatgttctcgcaggcaagaagacagttacagagttgatgcagaattaacacggatcaacaaaaatgtgcgccagctttgttgtgtgcccttttcctctagcggatcctatccacatttcgtgaatgaaccgattaagctctgacgagatttccttgttttctgtagatacctcttgtagaggtgtcaaagttatgttgtgatcgagagagttacctgcaaggtattatgcaagcggcttgatgaggacactcaactacgtgtgagtaggagtgcgttgctcagcagttgacgcgtgagccgcttgagcagcttgataaaggtcctaatcgtcttccagctgttggcagacgacaatgtgctgtagtagtaggataggcccgtaaaagtgtagaagcaataggttgagactgactgtaatgggtacttgcgttcaaagactgaaagtccaaaggattgctcaaaggcccctgaggtctgagcctctgagcgcgctcttcgtcaaaattcgccggggccatcggtcatcctctcgagggcagcatcttcctgcttgaagactgagtccgtctcaggcttgctggtcacattattgtcagtacctaccatgaagaattcaatattattttacattgtcaaccattacatggatcccatgttgtgcatagcctctatgtcatcctttggtcttttatgtctgtagcgtgctagtagtattcaagttgtagcactgctgtgaaacagtacgttcaagtagtgtgcagcagtacgttcagttagtggactggggcagcctcgccttcagcaaaggttaggtacatgagccagttgctcactcttgctttctacgaatcccataggctactttgccccctaaccgtgacgaccccctgtgtttgagaagtttgagtctttttacgttaccgtgaccaagcgagcagagtagaaactcttgaagttgtgtatgtaagaatacaaattgagaacacaaggttacctacctttatagttggtaaacagcaagcaataccagagattttcatcgcaacgtgactctatcattcactatattaagttgcacacggatgttgtacaacactacacgtaaaagagagaaaaatactaatgtcgatcgctcaggt

SEQ ID NO: 232 - DNA, 714 bp, synthetic construct
  source 1..714: mol_type = other DNA
atggtcaacgcggttatcttcacggactttgacggtactgtgacctggcaagacagcaacgacttcctcacggataccaagggttttggtaaggaggaacgctctaaggtgttcgaaggcgtgttggacggcaccaaatcgtttcgtgacggattttgggacatgctcgagtctgtgaaaaccccattcccggaatgcgttaaacttgtggaggagaatatccaacttgacccaggctttaaagatacttttgaatgggctcaagaaaatggcgtgcccattgttgtgatcagcagcggaatgcgtcccctcattaaggctcttcttgcacgactggttggaccagaagccatcgaaaagattgacattgttagcaacgaggttgagatcgactctgacggccagtggcgtattgtctacaaggatgacagctcttttggacacgacaagtccaaatccatcaccgcctataagaaacaattcgaagctgcaggtaaaaaaccgacctatttttactgcggtgacggcgtctcggatcttagcgcggcaaaagagtgcgacctgttgttcgctaagcgcggaaaggatctggtgacctactgtaagcgcgaacacgtcccattccatgagtttgataccttcgaggacattctttcgtcgatgaaagatgttctcgcaggcaagaagacagttacagagttgatgcagaattaa

SEQ ID NO: 233 - DNA, 3718 bp, synthetic construct
  source 1..3718: mol_type = other DNA
agatgtagccggcgctgtagagttttggacggataggttgggtttcagtcgagacttcgttgaagatgactttgcaggcgtcgtgcgtgatgatgtgaccctgtttatctcggccgttcaagatcaagttgtccctgacaatacacttgcatgggtctgggtacgcggattagatgaattgtacgcggaatggtctgaagttgtatccactaactttcgtgacgcttcaggtcctgctatgactgagattggtgaacaaccctgggggcgtgagttcgcactccgagatccagctggaaattgtgttcatttcgtagctgaggaacaggattaatggtgttcaccactgttgcttcccctttgttggagcgtccgtcgttctgatggcgctctgagcccaaaatatcccttcttcgcccgagagcaagcctcggagtgtgcttgcaatctacttttcctactaaagttatcttcttgtggcttctgaatttgaatagaacgtgttcagacttgttagctaaatttgttgatgcgagatacttgacagaatcccgttgatgaactcatctgtgtgaccaccgcctggtgatggaatctcgcgcggaagccgtggtgttactgactctcaagcaattcagtagataaatttgtataacatcattgcaaggggtgctagcaatcaattgtccaataccaaacggcggcaagtgcaaaggggcgatagagagtttctgcgaggaagggaaggaatccgtatgcctgaaaacttttgtacaagtgtctttgtaagggcgaggtctgctctgacatctctctgagatctgagatctgatacctgcaggataacttcgtataatgtatgctatacgaagttatgtcacagtatcggcatctctgtctcgacgacagtgagtatagtcaactatgctatctagtagccaaagtaagtctacattccgggctttgcaggggttagctatttcattagacaatacttacaaccttcgaagggcttccccagaattcaattctatattgattcaatatccacccatcggacccgctctccgtaccccctgttcgcttcgccactacaaccatgtcaagacctgagaatcgtagcaaattgccccactacggcccgagtgctgtcggctggttaaagtagaatgacttgggtagccagatcgagacgcctgacattgatacgcagacagcgcagtcagtttcaaactgacaactgacgcgtactggattgacaggactccttggccggtgccattcgaatcgcttgtagacctcttgccagcatcttgccagagaagcttgaaggctggatcgctcagcctgagctcacacttagtagctccactagtcactcaggtgctcagcctctcctcagcgcctcaagctcaagcctcagggcctcagctgcatcgagctctggtgccagtgccagtgccagtgccagtgccagtgccagtgccagtgccagtgaagagagtggtatgagccaagctatacccaaaagcaaatgatggttattgccagcttccatgcacccctggggcgaaggacaacgaacaacagacagagtttgaattattcactggcctagtactaccaatttaaatttggtggttcagcgcaggaacggcgcgagtgagcgtaagggcaaactccgcatggggcgtgacgtcagtgtccctctggctgaggcactccagcaggctctggtcaacgcatcaacgtgtgtgtgtgtctaccaagcacattgtgcgctcgctgtccgtgcgccgaaatcgcaccagtcagaacgtctataaaacccctcttgcttggagggttaccgggccgtcttttcccaacgctccggctcactcactactctacacaacaaatggtcaaggctgtcatctttactgacttcgacggaacggttacccttgaagatagcaacgattacctcacggacacgttgggattcggcaaggagaagcgtctgaaagtgtttgaaggcgtgctcgatgataccaagtcgtttcgccagggttttatggaaatgcttgagtccatccatacgccctttcctgagtgtatcaaaatcctggagaagaagatccgtcttgatcctggttttaaggatacattcgaatgggcacaagaaaatgatgtcccggttattgtggttagctccggcatgaagcctattattaaggtgctgctcacgcgccttgtcggccaggaaagcatccataagatcgatatcgtgtctaacgaagtcgaaattgatgcccatgaccagtggaagattatctacaaagacgaaagcccatttggacacgataagtcgcgttccatcgacgcctacaaaaaaaaatttgagtctacgctgaaagcgggcgagcagcgcccggtttatttctattgcggagatggcgtcagcgatctttctgcagcaaaagaatgtgatcttttgttcgctaaacgtggcaaagacttggttacttactgtaagaagcagaatgtgccctttcacgaatttgacactttcaaggatatcctggctagcatgaaacaagtgctcgcgggtgaaaaaacagtcgctgagctcatggagaactaacacggatcaacaaaaatgtgcgccagctttgttgtgtgcccttttcctctagcggatcctatccacatttcgtgaatgaaccgattaagctctgacgagatttccttgttttctgtagatacctcttgtagaggtgtcaaagttatgttgtgatcgagagagttacctgcaaggtattatgcaagcggcttgatgaggacactcaactacgtgtgagtaggagtgcgttgctcagcagttgacgcgtgagccgcttgagcagcttgataaaggtcctaatcgtcttccagctgttggcagacgacaatgtgctgtagtagtaggataggcccgtaaaagtgtagaagcaataggttgagactgactgtaatgggtacttgcgttcaaagactgaaagtccaaaggattgctcaaaggcccctgaggtctgagcctctgagcgcgctcttcgtcaaaattcgccggggccatcggtcatcctctcgagggcagcatcttcctgcttgaagactgagtccgtctcaggcttgctggtcacattattgtcagtacctaccatgaagaattcaatattattttacattgtcaaccattacatggatcccatgttgtgcatagcctctatgtcatcctttggtcttttatgtctgtagcgtgctagtagtattcaagttgtagcactgctgtgaaacagtacgttcaagtagtgtgcagcagtacgttcagttagtggactggggcagcctcgccttcagcaaaggttaggtacatgagccagttgctcactcttgctttctacgaatcccataggctactttgccccctaaccgtgacgaccccctgtgtttgagaagtttgagtctttttacgttaccgtgaccaagcgagcagagtagaaactcttgaagttgtgtatgtaagaatacaaattgagaacacaaggttacctacctttatagttggtaaacagcaagcaataccagagattttcatcgcaacgtgactctatcattcactatattaagttgcacacggatgttgtacaacactacacgtaaaagagagaaaaatactaatgtcgatcgctcaggt

SEQ ID NO: 234 - DNA, 726 bp, synthetic construct
  source 1..726: mol_type = other DNA
atggtcaaggctgtcatctttactgacttcgacggaacggttacccttgaagatagcaacgattacctcacggacacgttgggattcggcaaggagaagcgtctgaaagtgtttgaaggcgtgctcgatgataccaagtcgtttcgccagggttttatggaaatgcttgagtccatccatacgccctttcctgagtgtatcaaaatcctggagaagaagatccgtcttgatcctggttttaaggatacattcgaatgggcacaagaaaatgatgtcccggttattgtggttagctccggcatgaagcctattattaaggtgctgctcacgcgccttgtcggccaggaaagcatccataagatcgatatcgtgtctaacgaagtcgaaattgatgcccatgaccagtggaagattatctacaaagacgaaagcccatttggacacgataagtcgcgttccatcgacgcctacaaaaaaaaatttgagtctacgctgaaagcgggcgagcagcgcccggtttatttctattgcggagatggcgtcagcgatctttctgcagcaaaagaatgtgatcttttgttcgctaaacgtggcaaagacttggttacttactgtaagaagcagaatgtgccctttcacgaatttgacactttcaaggatatcctggctagcatgaaacaagtgctcgcgggtgaaaaaacagtcgctgagctcatggagaactaa

SEQ ID NO: 235 - DNA, 3715 bp, synthetic construct
  source 1..3715: mol_type = other DNA
agatgtagccggcgctgtagagttttggacggataggttgggtttcagtcgagacttcgttgaagatgactttgcaggcgtcgtgcgtgatgatgtgaccctgtttatctcggccgttcaagatcaagttgtccctgacaatacacttgcatgggtctgggtacgcggattagatgaattgtacgcggaatggtctgaagttgtatccactaactttcgtgacgcttcaggtcctgctatgactgagattggtgaacaaccctgggggcgtgagttcgcactccgagatccagctggaaattgtgttcatttcgtagctgaggaacaggattaatggtgttcaccactgttgcttcccctttgttggagcgtccgtcgttctgatggcgctctgagcccaaaatatcccttcttcgcccgagagcaagcctcggagtgtgcttgcaatctacttttcctactaaagttatcttcttgtggcttctgaatttgaatagaacgtgttcagacttgttagctaaatttgttgatgcgagatacttgacagaatcccgttgatgaactcatctgtgtgaccaccgcctggtgatggaatctcgcgcggaagccgtggtgttactgactctcaagcaattcagtagataaatttgtataacatcattgcaaggggtgctagcaatcaattgtccaataccaaacggcggcaagtgcaaaggggcgatagagagtttctgcgaggaagggaaggaatccgtatgcctgaaaacttttgtacaagtgtctttgtaagggcgaggtctgctctgacatctctctgagatctgagatctgatacctgcaggataacttcgtataatgtatgctatacgaagttatgtcacagtatcggcatctctgtctcgacgacagtgagtatagtcaactatgctatctagtagccaaagtaagtctacattccgggctttgcaggggttagctatttcattagacaatacttacaaccttcgaagggcttccccagaattcaattctatattgattcaatatccacccatcggacccgctctccgtaccccctgttcgcttcgccactacaaccatgtcaagacctgagaatcgtagcaaattgccccactacggcccgagtgctgtcggctggttaaagtagaatgacttgggtagccagatcgagacgcctgacattgatacgcagacagcgcagtcagtttcaaactgacaactgacgcgtactggattgacaggactccttggccggtgccattcgaatcgcttgtagacctcttgccagcatcttgccagagaagcttgaaggctggatcgctcagcctgagctcacacttagtagctccactagtcactcaggtgctcagcctctcctcagcgcctcaagctcaagcctcagggcctcagctgcatcgagctctggtgccagtgccagtgccagtgccagtgccagtgccagtgccagtgccagtgaagagagtggtatgagccaagctatacccaaaagcaaatgatggttattgccagcttccatgcacccctggggcgaaggacaacgaacaacagacagagtttgaattattcactggcctagtactaccaatttaaatttggtggttcagcgcaggaacggcgcgagtgagcgtaagggcaaactccgcatggggcgtgacgtcagtgtccctctggctgaggcactccagcaggctctggtcaacgcatcaacgtgtgtgtgtgtctaccaagcacattgtgcgctcgctgtccgtgcgccgaaatcgcaccagtcagaacgtctataaaacccctcttgcttggagggttaccgggccgtcttttcccaacgctccggctcactcactactctacacaacaaatggtgaaagctgtcatcttttcggattttgacggtacgatcacactccaggattccaatgacttcttggtcgataataagggaatgggaaagaatgatcgtttgaaacttttcgagggtgtcttgaatggcacgaaaaattttcgtgacatcttcagcgacatgctgggtagcctgaatcttacccaggaagagggtattgagttcttgaaagagaatatcgaacttgacccaggattcaaaaagacgttcctgtgggcccaagaaaacaacgtcccgcttattgtcgtttcgtccggaaccgttccggtgattcgtgcactccttactaagatgatcggttccgacattgagaaacttgacatcgtctctaatgacctggaggtgaatgaatcgaaccactggaccgttctttaccgcgactcgactccacacggtcatgacaagagcaagacaattgacgactataaatctaaatacgaatcccaacttgtcgagggtgaggagcgtccggtctatttctactgcggcgacggtatctccgacctcactgcagccaaagagtgtgaccttttgtttgccaaggcaggtaaggatctcatcacattttgtaaaaagcagaacgtgccctatcacgagtttaatacatgggatgacatcctgcgctcgatgaaagcggtcctgaacggagaaaaaacagtgaaggaacttatggagaattaacacggatcaacaaaaatgtgcgccagctttgttgtgtgcccttttcctctagcggatcctatccacatttcgtgaatgaaccgattaagctctgacgagatttccttgttttctgtagatacctcttgtagaggtgtcaaagttatgttgtgatcgagagagttacctgcaaggtattatgcaagcggcttgatgaggacactcaactacgtgtgagtaggagtgcgttgctcagcagttgacgcgtgagccgcttgagcagcttgataaaggtcctaatcgtcttccagctgttggcagacgacaatgtgctgtagtagtaggataggcccgtaaaagtgtagaagcaataggttgagactgactgtaatgggtacttgcgttcaaagactgaaagtccaaaggattgctcaaaggcccctgaggtctgagcctctgagcgcgctcttcgtcaaaattcgccggggccatcggtcatcctctcgagggcagcatcttcctgcttgaagactgagtccgtctcaggcttgctggtcacattattgtcagtacctaccatgaagaattcaatattattttacattgtcaaccattacatggatcccatgttgtgcatagcctctatgtcatcctttggtcttttatgtctgtagcgtgctagtagtattcaagttgtagcactgctgtgaaacagtacgttcaagtagtgtgcagcagtacgttcagttagtggactggggcagcctcgccttcagcaaaggttaggtacatgagccagttgctcactcttgctttctacgaatcccataggctactttgccccctaaccgtgacgaccccctgtgtttgagaagtttgagtctttttacgttaccgtgaccaagcgagcagagtagaaactcttgaagttgtgtatgtaagaatacaaattgagaacacaaggttacctacctttatagttggtaaacagcaagcaataccagagattttcatcgcaacgtgactctatcattcactatattaagttgcacacggatgttgtacaacactacacgtaaaagagagaaaaatactaatgtcgatcgctcaggt

SEQ ID NO: 236 - DNA, 723 bp, synthetic construct
  source 1..723: mol_type = other DNA
atggtgaaagctgtcatcttttcggattttgacggtacgatcacactccaggattccaatgacttcttggtcgataataagggaatgggaaagaatgatcgtttgaaacttttcgagggtgtcttgaatggcacgaaaaattttcgtgacatcttcagcgacatgctgggtagcctgaatcttacccaggaagagggtattgagttcttgaaagagaatatcgaacttgacccaggattcaaaaagacgttcctgtgggcccaagaaaacaacgtcccgcttattgtcgtttcgtccggaaccgttccggtgattcgtgcactccttactaagatgatcggttccgacattgagaaacttgacatcgtctctaatgacctggaggtgaatgaatcgaaccactggaccgttctttaccgcgactcgactccacacggtcatgacaagagcaagacaattgacgactataaatctaaatacgaatcccaacttgtcgagggtgaggagcgtccggtctatttctactgcggcgacggtatctccgacctcactgcagccaaagagtgtgaccttttgtttgccaaggcaggtaaggatctcatcacattttgtaaaaagcagaacgtgccctatcacgagtttaatacatgggatgacatcctgcgctcgatgaaagcggtcctgaacggagaaaaaacagtgaaggaacttatggagaattaa

SEQ ID NO: 237 - DNA, 3718 bp, synthetic construct
  source 1..3718: mol_type = other DNA
agatgtagccggcgctgtagagttttggacggataggttgggtttcagtcgagacttcgttgaagatgactttgcaggcgtcgtgcgtgatgatgtgaccctgtttatctcggccgttcaagatcaagttgtccctgacaatacacttgcatgggtctgggtacgcggattagatgaattgtacgcggaatggtctgaagttgtatccactaactttcgtgacgcttcaggtcctgctatgactgagattggtgaacaaccctgggggcgtgagttcgcactccgagatccagctggaaattgtgttcatttcgtagctgaggaacaggattaatggtgttcaccactgttgcttcccctttgttggagcgtccgtcgttctgatggcgctctgagcccaaaatatcccttcttcgcccgagagcaagcctcggagtgtgcttgcaatctacttttcctactaaagttatcttcttgtggcttctgaatttgaatagaacgtgttcagacttgttagctaaatttgttgatgcgagatacttgacagaatcccgttgatgaactcatctgtgtgaccaccgcctggtgatggaatctcgcgcggaagccgtggtgttactgactctcaagcaattcagtagataaatttgtataacatcattgcaaggggtgctagcaatcaattgtccaataccaaacggcggcaagtgcaaaggggcgatagagagtttctgcgaggaagggaaggaatccgtatgcctgaaaacttttgtacaagtgtctttgtaagggcgaggtctgctctgacatctctctgagatctgagatctgatacctgcaggataacttcgtataatgtatgctatacgaagttatgtcacagtatcggcatctctgtctcgacgacagtgagtatagtcaactatgctatctagtagccaaagtaagtctacattccgggctttgcaggggttagctatttcattagacaatacttacaaccttcgaagggcttccccagaattcaattctatattgattcaatatccacccatcggacccgctctccgtaccccctgttcgcttcgccactacaaccatgtcaagacctgagaatcgtagcaaattgccccactacggcccgagtgctgtcggctggttaaagtagaatgacttgggtagccagatcgagacgcctgacattgatacgcagacagcgcagtcagtttcaaactgacaactgacgcgtactggattgacaggactccttggccggtgccattcgaatcgcttgtagacctcttgccagcatcttgccagagaagcttgaaggctggatcgctcagcctgagctcacacttagtagctccactagtcactcaggtgctcagcctctcctcagcgcctcaagctcaagcctcagggcctcagctgcatcgagctctggtgccagtgccagtgccagtgccagtgccagtgccagtgccagtgccagtgaagagagtggtatgagccaagctatacccaaaagcaaatgatggttattgccagcttccatgcacccctggggcgaaggacaacgaacaacagacagagtttgaattattcactggcctagtactaccaatttaaatttggtggttcagcgcaggaacggcgcgagtgagcgtaagggcaaactccgcatggggcgtgacgtcagtgtccctctggctgaggcactccagcaggctctggtcaacgcatcaacgtgtgtgtgtgtctaccaagcacattgtgcgctcgctgtccgtgcgccgaaatcgcaccagtcagaacgtctataaaacccctcttgcttggagggttaccgggccgtcttttcccaacgctccggctcactcactactctacacaacaaatggtcaaggcagtcatcttcacggactttgatggcactgtcaccctggaggatagcaacgattacctcacagacacacttggattcggcaaagaggaacgcctgaaagtttttgagggcgtgcttgatggaaccaaatcttttcgtcaaggtttcatggaaatgcttgagtctatccacactccttttcctgagtgcatcaaaattcttgaaaaaaaaatccgactcgatcctggctttaaagatacctttgaatgggcgcaagagaatgatgttcctgttgtggtcgtgtcgtctggaatgaagcccattatcaaagtgctgttgactcgattggtgggtcaacactcgatccataagattgacatcgtttcgaatgaggttgaaattgaggcgcacgatgaatggaaaatcatctataaggacgaaagcccctttggtcatgacaagtcgcgctcgattgacgcatataagaaaaaatttgaatccgccctgaaacctggagatgaacgcccagtttacttttactgcggagatggtgtcagcgatctgtccgccgcaaaagaatgtgatcttctgtttgccaaacgtggaaaggacctggtgacctactgcaagcgtcaaaatgtgccctttcacgaatttgacactttcgaagacatccttgcctccatgaaacaagtcctcgccggagaaaaaactgttacggagcttatggagaattaacacggatcaacaaaaatgtgcgccagctttgttgtgtgcccttttcctctagcggatcctatccacatttcgtgaatgaaccgattaagctctgacgagatttccttgttttctgtagatacctcttgtagaggtgtcaaagttatgttgtgatcgagagagttacctgcaaggtattatgcaagcggcttgatgaggacactcaactacgtgtgagtaggagtgcgttgctcagcagttgacgcgtgagccgcttgagcagcttgataaaggtcctaatcgtcttccagctgttggcagacgacaatgtgctgtagtagtaggataggcccgtaaaagtgtagaagcaataggttgagactgactgtaatgggtacttgcgttcaaagactgaaagtccaaaggattgctcaaaggcccctgaggtctgagcctctgagcgcgctcttcgtcaaaattcgccggggccatcggtcatcctctcgagggcagcatcttcctgcttgaagactgagtccgtctcaggcttgctggtcacattattgtcagtacctaccatgaagaattcaatattattttacattgtcaaccattacatggatcccatgttgtgcatagcctctatgtcatcctttggtcttttatgtctgtagcgtgctagtagtattcaagttgtagcactgctgtgaaacagtacgttcaagtagtgtgcagcagtacgttcagttagtggactggggcagcctcgccttcagcaaaggttaggtacatgagccagttgctcactcttgctttctacgaatcccataggctactttgccccctaaccgtgacgaccccctgtgtttgagaagtttgagtctttttacgttaccgtgaccaagcgagcagagtagaaactcttgaagttgtgtatgtaagaatacaaattgagaacacaaggttacctacctttatagttggtaaacagcaagcaataccagagattttcatcgcaacgtgactctatcattcactatattaagttgcacacggatgttgtacaacactacacgtaaaagagagaaaaatactaatgtcgatcgctcaggt

SEQ ID NO: 238 - DNA, 726 bp, synthetic construct
  source 1..726: mol_type = other DNA
atggtcaaggcagtcatcttcacggactttgatggcactgtcaccctggaggatagcaacgattacctcacagacacacttggattcggcaaagaggaacgcctgaaagtttttgagggcgtgcttgatggaaccaaatcttttcgtcaaggtttcatggaaatgcttgagtctatccacactccttttcctgagtgcatcaaaattcttgaaaaaaaaatccgactcgatcctggctttaaagatacctttgaatgggcgcaagagaatgatgttcctgttgtggtcgtgtcgtctggaatgaagcccattatcaaagtgctgttgactcgattggtgggtcaacactcgatccataagattgacatcgtttcgaatgaggttgaaattgaggcgcacgatgaatggaaaatcatctataaggacgaaagcccctttggtcatgacaagtcgcgctcgattgacgcatataagaaaaaatttgaatccgccctgaaacctggagatgaacgcccagtttacttttactgcggagatggtgtcagcgatctgtccgccgcaaaagaatgtgatcttctgtttgccaaacgtggaaaggacctggtgacctactgcaagcgtcaaaatgtgccctttcacgaatttgacactttcgaagacatccttgcctccatgaaacaagtcctcgccggagaaaaaactgttacggagcttatggagaattaa

SEQ ID NO: 239 - DNA, 3718 bp, synthetic construct
  source 1..3718: mol_type = other DNA
agatgtagccggcgctgtagagttttggacggataggttgggtttcagtcgagacttcgttgaagatgactttgcaggcgtcgtgcgtgatgatgtgaccctgtttatctcggccgttcaagatcaagttgtccctgacaatacacttgcatgggtctgggtacgcggattagatgaattgtacgcggaatggtctgaagttgtatccactaactttcgtgacgcttcaggtcctgctatgactgagattggtgaacaaccctgggggcgtgagttcgcactccgagatccagctggaaattgtgttcatttcgtagctgaggaacaggattaatggtgttcaccactgttgcttcccctttgttggagcgtccgtcgttctgatggcgctctgagcccaaaatatcccttcttcgcccgagagcaagcctcggagtgtgcttgcaatctacttttcctactaaagttatcttcttgtggcttctgaatttgaatagaacgtgttcagacttgttagctaaatttgttgatgcgagatacttgacagaatcccgttgatgaactcatctgtgtgaccaccgcctggtgatggaatctcgcgcggaagccgtggtgttactgactctcaagcaattcagtagataaatttgtataacatcattgcaaggggtgctagcaatcaattgtccaataccaaacggcggcaagtgcaaaggggcgatagagagtttctgcgaggaagggaaggaatccgtatgcctgaaaacttttgtacaagtgtctttgtaagggcgaggtctgctctgacatctctctgagatctgagatctgatacctgcaggataacttcgtataatgtatgctatacgaagttatgtcacagtatcggcatctctgtctcgacgacagtgagtatagtcaactatgctatctagtagccaaagtaagtctacattccgggctttgcaggggttagctatttcattagacaatacttacaaccttcgaagggcttccccagaattcaattctatattgattcaatatccacccatcggacccgctctccgtaccccctgttcgcttcgccactacaaccatgtcaagacctgagaatcgtagcaaattgccccactacggcccgagtgctgtcggctggttaaagtagaatgacttgggtagccagatcgagacgcctgacattgatacgcagacagcgcagtcagtttcaaactgacaactgacgcgtactggattgacaggactccttggccggtgccattcgaatcgcttgtagacctcttgccagcatcttgccagagaagcttgaaggctggatcgctcagcctgagctcacacttagtagctccactagtcactcaggtgctcagcctctcctcagcgcctcaagctcaagcctcagggcctcagctgcatcgagctctggtgccagtgccagtgccagtgccagtgccagtgccagtgccagtgccagtgaagagagtggtatgagccaagctatacccaaaagcaaatgatggttattgccagcttccatgcacccctggggcgaaggacaacgaacaacagacagagtttgaattattcactggcctagtactaccaatttaaatttggtggttcagcgcaggaacggcgcgagtgagcgtaagggcaaactccgcatggggcgtgacgtcagtgtccctctggctgaggcactccagcaggctctggtcaacgcatcaacgtgtgtgtgtgtctaccaagcacattgtgcgctcgctgtccgtgcgccgaaatcgcaccagtcagaacgtctataaaacccctcttgcttggagggttaccgggccgtcttttcccaacgctccggctcactcactactctacacaacaaatggtgaaggctgttatcttttctgactttgatggcacaatcacttggcaagactccaacgattacctcactgatacgctcggctttggtaaggaagagcgcctgaaaatcttcgagggcgtcttggatggaaccaagccctttcgagagggtttcacacaaatgattagcagcattgagactccactcccagaatgtttggctatcctcaaagaaaaaattcaacttgaccctggattcaagaagacctatgaatggagcctggagcatagcgtccctttgatcgtggtttcctcgggcatgaaaccaattatcaaagcactcttggagaacatgcttggtgaggaagcgatcaaaaatcttgagatcgtggcaaatgacgtcgagcttgatgcaaacaataagatgacggtcacgtaccgcgacgaaactcctttcggtcatgataaatccaagtccattgacaattttaaggcccattacgaggcgcagctgccggaaggagctgaaaagccgacttatttctactgtggcgacggcatctccgatctgtcggcagcgaaagagtgcgatttgctctttgcgaaacgtggtaaagatcttgtgacgtattgcaagcgtcaaaacgtccccttccacgaattcgatacttttgaggatattctccgaagcatgaaccaagtcctcgatggagagaaaacggtttctgagcttatggagaactaacacggatcaacaaaaatgtgcgccagctttgttgtgtgcccttttcctctagcggatcctatccacatttcgtgaatgaaccgattaagctctgacgagatttccttgttttctgtagatacctcttgtagaggtgtcaaagttatgttgtgatcgagagagttacctgcaaggtattatgcaagcggcttgatgaggacactcaactacgtgtgagtaggagtgcgttgctcagcagttgacgcgtgagccgcttgagcagcttgataaaggtcctaatcgtcttccagctgttggcagacgacaatgtgctgtagtagtaggataggcccgtaaaagtgtagaagcaataggttgagactgactgtaatgggtacttgcgttcaaagactgaaagtccaaaggattgctcaaaggcccctgaggtctgagcctctgagcgcgctcttcgtcaaaattcgccggggccatcggtcatcctctcgagggcagcatcttcctgcttgaagactgagtccgtctcaggcttgctggtcacattattgtcagtacctaccatgaagaattcaatattattttacattgtcaaccattacatggatcccatgttgtgcatagcctctatgtcatcctttggtcttttatgtctgtagcgtgctagtagtattcaagttgtagcactgctgtgaaacagtacgttcaagtagtgtgcagcagtacgttcagttagtggactggggcagcctcgccttcagcaaaggttaggtacatgagccagttgctcactcttgctttctacgaatcccataggctactttgccccctaaccgtgacgaccccctgtgtttgagaagtttgagtctttttacgttaccgtgaccaagcgagcagagtagaaactcttgaagttgtgtatgtaagaatacaaattgagaacacaaggttacctacctttatagttggtaaacagcaagcaataccagagattttcatcgcaacgtgactctatcattcactatattaagttgcacacggatgttgtacaacactacacgtaaaagagagaaaaatactaatgtcgatcgctcaggt

SEQ ID NO: 240 - DNA, 726 bp, synthetic construct
  source 1..726: mol_type = other DNA
atggtgaaggctgttatcttttctgactttgatggcacaatcacttggcaagactccaacgattacctcactgatacgctcggctttggtaaggaagagcgcctgaaaatcttcgagggcgtcttggatggaaccaagccctttcgagagggtttcacacaaatgattagcagcattgagactccactcccagaatgtttggctatcctcaaagaaaaaattcaacttgaccctggattcaagaagacctatgaatggagcctggagcatagcgtccctttgatcgtggtttcctcgggcatgaaaccaattatcaaagcactcttggagaacatgcttggtgaggaagcgatcaaaaatcttgagatcgtggcaaatgacgtcgagcttgatgcaaacaataagatgacggtcacgtaccgcgacgaaactcctttcggtcatgataaatccaagtccattgacaattttaaggcccattacgaggcgcagctgccggaaggagctgaaaagccgacttatttctactgtggcgacggcatctccgatctgtcggcagcgaaagagtgcgatttgctctttgcgaaacgtggtaaagatcttgtgacgtattgcaagcgtcaaaacgtccccttccacgaattcgatacttttgaggatattctccgaagcatgaaccaagtcctcgatggagagaaaacggtttctgagcttatggagaactaa

SEQ ID NO: 241 - DNA, 3766 bp, synthetic construct
  source 1..3766: mol_type = other DNA
agatgtagccggcgctgtagagttttggacggataggttgggtttcagtcgagacttcgttgaagatgactttgcaggcgtcgtgcgtgatgatgtgaccctgtttatctcggccgttcaagatcaagttgtccctgacaatacacttgcatgggtctgggtacgcggattagatgaattgtacgcggaatggtctgaagttgtatccactaactttcgtgacgcttcaggtcctgctatgactgagattggtgaacaaccctgggggcgtgagttcgcactccgagatccagctggaaattgtgttcatttcgtagctgaggaacaggattaatggtgttcaccactgttgcttcccctttgttggagcgtccgtcgttctgatggcgctctgagcccaaaatatcccttcttcgcccgagagcaagcctcggagtgtgcttgcaatctacttttcctactaaagttatcttcttgtggcttctgaatttgaatagaacgtgttcagacttgttagctaaatttgttgatgcgagatacttgacagaatcccgttgatgaactcatctgtgtgaccaccgcctggtgatggaatctcgcgcggaagccgtggtgttactgactctcaagcaattcagtagataaatttgtataacatcattgcaaggggtgctagcaatcaattgtccaataccaaacggcggcaagtgcaaaggggcgatagagagtttctgcgaggaagggaaggaatccgtatgcctgaaaacttttgtacaagtgtctttgtaagggcgaggtctgctctgacatctctctgagatctgagatctgatacctgcaggataacttcgtataatgtatgctatacgaagttatgtcacagtatcggcatctctgtctcgacgacagtgagtatagtcaactatgctatctagtagccaaagtaagtctacattccgggctttgcaggggttagctatttcattagacaatacttacaaccttcgaagggcttccccagaattcaattctatattgattcaatatccacccatcggacccgctctccgtaccccctgttcgcttcgccactacaaccatgtcaagacctgagaatcgtagcaaattgccccactacggcccgagtgctgtcggctggttaaagtagaatgacttgggtagccagatcgagacgcctgacattgatacgcagacagcgcagtcagtttcaaactgacaactgacgcgtactggattgacaggactccttggccggtgccattcgaatcgcttgtagacctcttgccagcatcttgccagagaagcttgaaggctggatcgctcagcctgagctcacacttagtagctccactagtcactcaggtgctcagcctctcctcagcgcctcaagctcaagcctcagggcctcagctgcatcgagctctggtgccagtgccagtgccagtgccagtgccagtgccagtgccagtgccagtgaagagagtggtatgagccaagctatacccaaaagcaaatgatggttattgccagcttccatgcacccctggggcgaaggacaacgaacaacagacagagtttgaattattcactggcctagtactaccaatttaaatttggtggttcagcgcaggaacggcgcgagtgagcgtaagggcaaactccgcatggggcgtgacgtcagtgtccctctggctgaggcactccagcaggctctggtcaacgcatcaacgtgtgtgtgtgtctaccaagcacattgtgcgctcgctgtccgtgcgccgaaatcgcaccagtcagaacgtctataaaacccctcttgcttggagggttaccgggccgtcttttcccaacgctccggctcactcactactctacacaacaaatgggttccaccctggacatcgcactccctgcgcttaagactaagccgaagttcatcttcttcacagattttgatggcactattactcaacaagattcgaacgactggatgactgataatttgggatttggcgcggagcttcgcaaaaagggtaatgaggacgtgttgtttggccgtcgcgacttccgtgattctttcgcagatatgctggattccattaagaccccgtttaatgaatgcattgaacttcttctcaaaaacattactcttgatccgggtttcaagcagttcttcgagtgggcaaaagaaaataatgttcccatcgtcattttgtcgggcggaatggaaccagtcatccgcgcgttgttggcacatatgctcggtaaagaagaggcagaaacgcttcaaattgtctcgaacgatgtcgcaccccgtccgggtaagtctgttaatgaggcgggcggatggcacatcgtttaccatgatgacagcggcttcggtcatgacaaatcgcttgaaatccgtccgtacgcacgcctcccggcagaagagcgccctgttctgttttatgcgggtgacggagtctctgacctgtctgctgcgaaagagacggatctcctcttcgcaaaatctggtcgcgatcttgtctcgtattgcgaacgtgagaacgtgccatttaccacgtttcaagattttacagaaatcttggcaacggttaaagacatcgttgcaggcaagacgactgttaaggaagctgccactggacgaaaataacacggatcaacaaaaatgtgcgccagctttgttgtgtgcccttttcctctagcggatcctatccacatttcgtgaatgaaccgattaagctctgacgagatttccttgttttctgtagatacctcttgtagaggtgtcaaagttatgttgtgatcgagagagttacctgcaaggtattatgcaagcggcttgatgaggacactcaactacgtgtgagtaggagtgcgttgctcagcagttgacgcgtgagccgcttgagcagcttgataaaggtcctaatcgtcttccagctgttggcagacgacaatgtgctgtagtagtaggataggcccgtaaaagtgtagaagcaataggttgagactgactgtaatgggtacttgcgttcaaagactgaaagtccaaaggattgctcaaaggcccctgaggtctgagcctctgagcgcgctcttcgtcaaaattcgccggggccatcggtcatcctctcgagggcagcatcttcctgcttgaagactgagtccgtctcaggcttgctggtcacattattgtcagtacctaccatgaagaattcaatattattttacattgtcaaccattacatggatcccatgttgtgcatagcctctatgtcatcctttggtcttttatgtctgtagcgtgctagtagtattcaagttgtagcactgctgtgaaacagtacgttcaagtagtgtgcagcagtacgttcagttagtggactggggcagcctcgccttcagcaaaggttaggtacatgagccagttgctcactcttgctttctacgaatcccataggctactttgccccctaaccgtgacgaccccctgtgtttgagaagtttgagtctttttacgttaccgtgaccaagcgagcagagtagaaactcttgaagttgtgtatgtaagaatacaaattgagaacacaaggttacctacctttatagttggtaaacagcaagcaataccagagattttcatcgcaacgtgactctatcattcactatattaagttgcacacggatgttgtacaacactacacgtaaaagagagaaaaatactaatgtcgatcgctcaggt

SEQ ID NO: 242 - DNA, 774 bp, synthetic construct
  source 1..774: mol_type = other DNA
atgggttccaccctggacatcgcactccctgcgcttaagactaagccgaagttcatcttcttcacagattttgatggcactattactcaacaagattcgaacgactggatgactgataatttgggatttggcgcggagcttcgcaaaaagggtaatgaggacgtgttgtttggccgtcgcgacttccgtgattctttcgcagatatgctggattccattaagaccccgtttaatgaatgcattgaacttcttctcaaaaacattactcttgatccgggtttcaagcagttcttcgagtgggcaaaagaaaataatgttcccatcgtcattttgtcgggcggaatggaaccagtcatccgcgcgttgttggcacatatgctcggtaaagaagaggcagaaacgcttcaaattgtctcgaacgatgtcgcaccccgtccgggtaagtctgttaatgaggcgggcggatggcacatcgtttaccatgatgacagcggcttcggtcatgacaaatcgcttgaaatccgtccgtacgcacgcctcccggcagaagagcgccctgttctgttttatgcgggtgacggagtctctgacctgtctgctgcgaaagagacggatctcctcttcgcaaaatctggtcgcgatcttgtctcgtattgcgaacgtgagaacgtgccatttaccacgtttcaagattttacagaaatcttggcaacggttaaagacatcgttgcaggcaagacgactgttaaggaagctgccactggacgaaaataa

SEQ ID NO: 243 - DNA, 3751 bp, synthetic construct
  source 1..3751: mol_type = other DNA
agatgtagccggcgctgtagagttttggacggataggttgggtttcagtcgagacttcgttgaagatgactttgcaggcgtcgtgcgtgatgatgtgaccctgtttatctcggccgttcaagatcaagttgtccctgacaatacacttgcatgggtctgggtacgcggattagatgaattgtacgcggaatggtctgaagttgtatccactaactttcgtgacgcttcaggtcctgctatgactgagattggtgaacaaccctgggggcgtgagttcgcactccgagatccagctggaaattgtgttcatttcgtagctgaggaacaggattaatggtgttcaccactgttgcttcccctttgttggagcgtccgtcgttctgatggcgctctgagcccaaaatatcccttcttcgcccgagagcaagcctcggagtgtgcttgcaatctacttttcctactaaagttatcttcttgtggcttctgaatttgaatagaacgtgttcagacttgttagctaaatttgttgatgcgagatacttgacagaatcccgttgatgaactcatctgtgtgaccaccgcctggtgatggaatctcgcgcggaagccgtggtgttactgactctcaagcaattcagtagataaatttgtataacatcattgcaaggggtgctagcaatcaattgtccaataccaaacggcggcaagtgcaaaggggcgatagagagtttctgcgaggaagggaaggaatccgtatgcctgaaaacttttgtacaagtgtctttgtaagggcgaggtctgctctgacatctctctgagatctgagatctgatacctgcaggataacttcgtataatgtatgctatacgaagttatgtcacagtatcggcatctctgtctcgacgacagtgagtatagtcaactatgctatctagtagccaaagtaagtctacattccgggctttgcaggggttagctatttcattagacaatacttacaaccttcgaagggcttccccagaattcaattctatattgattcaatatccacccatcggacccgctctccgtaccccctgttcgcttcgccactacaaccatgtcaagacctgagaatcgtagcaaattgccccactacggcccgagtgctgtcggctggttaaagtagaatgacttgggtagccagatcgagacgcctgacattgatacgcagacagcgcagtcagtttcaaactgacaactgacgcgtactggattgacaggactccttggccggtgccattcgaatcgcttgtagacctcttgccagcatcttgccagagaagcttgaaggctggatcgctcagcctgagctcacacttagtagctccactagtcactcaggtgctcagcctctcctcagcgcctcaagctcaagcctcagggcctcagctgcatcgagctctggtgccagtgccagtgccagtgccagtgccagtgccagtgccagtgccagtgaagagagtggtatgagccaagctatacccaaaagcaaatgatggttattgccagcttccatgcacccctggggcgaaggacaacgaacaacagacagagtttgaattattcactggcctagtactaccaatttaaatttggtggttcagcgcaggaacggcgcgagtgagcgtaagggcaaactccgcatggggcgtgacgtcagtgtccctctggctgaggcactccagcaggctctggtcaacgcatcaacgtgtgtgtgtgtctaccaagcacattgtgcgctcgctgtccgtgcgccgaaatcgcaccagtcagaacgtctataaaacccctcttgcttggagggttaccgggccgtcttttcccaacgctccggctcactcactactctacacaacaaatgagcactagcactacgccagcacccgcagtgaacggtactccggctcttaagacaaacccaaagtatattgtttttaccgactgggacggcaccgttacgctgcaggattctaatgaccatatgactcacaacctcggcttcggttacgaaaaacgaattgctttgaatgaccgtatcctggatggctctattagcttccgcgatgcttttcaagagatgcttgatagcattcacactccgtttccagaatgtatcgactacctcctgaaagagatccagttggatccgggattcccagatttttataagtgggcgaaggccaacaatattccaattgtggttgtgtctagcggtatgaaacccatcatccatgcactgttggttaaactggtgggcaagaccgcagcggatgatattgaaatcattagcaatgatgtcgcaattaaggaggacggttcttgggatattgtttttcgagacgaaagcgatttcggccatgacaaatcgcgttgcattcgaccatataccgcaatctctgaccgacctacgcttttctactgcggtgacggagtctcggatctctcggcggctcgcgaaaccgatctcctttttgcgaaggaaggaaaggacctcatcacatattgtaagcgagaacacatcccttataccacgttcgcctcgtttaaagatattcattctaaaatccaaaatattgtggaaggtaagaagactgtgaaggagtcgcaggataactaacacggatcaacaaaaatgtgcgccagctttgttgtgtgcccttttcctctagcggatcctatccacatttcgtgaatgaaccgattaagctctgacgagatttccttgttttctgtagatacctcttgtagaggtgtcaaagttatgttgtgatcgagagagttacctgcaaggtattatgcaagcggcttgatgaggacactcaactacgtgtgagtaggagtgcgttgctcagcagttgacgcgtgagccgcttgagcagcttgataaaggtcctaatcgtcttccagctgttggcagacgacaatgtgctgtagtagtaggataggcccgtaaaagtgtagaagcaataggttgagactgactgtaatgggtacttgcgttcaaagactgaaagtccaaaggattgctcaaaggcccctgaggtctgagcctctgagcgcgctcttcgtcaaaattcgccggggccatcggtcatcctctcgagggcagcatcttcctgcttgaagactgagtccgtctcaggcttgctggtcacattattgtcagtacctaccatgaagaattcaatattattttacattgtcaaccattacatggatcccatgttgtgcatagcctctatgtcatcctttggtcttttatgtctgtagcgtgctagtagtattcaagttgtagcactgctgtgaaacagtacgttcaagtagtgtgcagcagtacgttcagttagtggactggggcagcctcgccttcagcaaaggttaggtacatgagccagttgctcactcttgctttctacgaatcccataggctactttgccccctaaccgtgacgaccccctgtgtttgagaagtttgagtctttttacgttaccgtgaccaagcgagcagagtagaaactcttgaagttgtgtatgtaagaatacaaattgagaacacaaggttacctacctttatagttggtaaacagcaagcaataccagagattttcatcgcaacgtgactctatcattcactatattaagttgcacacggatgttgtacaacactacacgtaaaagagagaaaaatactaatgtcgatcgctcaggt

SEQ ID NO: 244 - DNA, 759 bp, synthetic construct
  source 1..759: mol_type = other DNA
atgagcactagcactacgccagcacccgcagtgaacggtactccggctcttaagacaaacccaaagtatattgtttttaccgactgggacggcaccgttacgctgcaggattctaatgaccatatgactcacaacctcggcttcggttacgaaaaacgaattgctttgaatgaccgtatcctggatggctctattagcttccgcgatgcttttcaagagatgcttgatagcattcacactccgtttccagaatgtatcgactacctcctgaaagagatccagttggatccgggattcccagatttttataagtgggcgaaggccaacaatattccaattgtggttgtgtctagcggtatgaaacccatcatccatgcactgttggttaaactggtgggcaagaccgcagcggatgatattgaaatcattagcaatgatgtcgcaattaaggaggacggttcttgggatattgtttttcgagacgaaagcgatttcggccatgacaaatcgcgttgcattcgaccatataccgcaatctctgaccgacctacgcttttctactgcggtgacggagtctcggatctctcggcggctcgcgaaaccgatctcctttttgcgaaggaaggaaaggacctcatcacatattgtaagcgagaacacatcccttataccacgttcgcctcgtttaaagatattcattctaaaatccaaaatattgtggaaggtaagaagactgtgaaggagtcgcaggataactaa

SEQ ID NO: 245 - DNA, 3709 bp, synthetic construct
  source 1..3709: mol_type = other DNA
agatgtagccggcgctgtagagttttggacggataggttgggtttcagtcgagacttcgttgaagatgactttgcaggcgtcgtgcgtgatgatgtgaccctgtttatctcggccgttcaagatcaagttgtccctgacaatacacttgcatgggtctgggtacgcggattagatgaattgtacgcggaatggtctgaagttgtatccactaactttcgtgacgcttcaggtcctgctatgactgagattggtgaacaaccctgggggcgtgagttcgcactccgagatccagctggaaattgtgttcatttcgtagctgaggaacaggattaatggtgttcaccactgttgcttcccctttgttggagcgtccgtcgttctgatggcgctctgagcccaaaatatcccttcttcgcccgagagcaagcctcggagtgtgcttgcaatctacttttcctactaaagttatcttcttgtggcttctgaatttgaatagaacgtgttcagacttgttagctaaatttgttgatgcgagatacttgacagaatcccgttgatgaactcatctgtgtgaccaccgcctggtgatggaatctcgcgcggaagccgtggtgttactgactctcaagcaattcagtagataaatttgtataacatcattgcaaggggtgctagcaatcaattgtccaataccaaacggcggcaagtgcaaaggggcgatagagagtttctgcgaggaagggaaggaatccgtatgcctgaaaacttttgtacaagtgtctttgtaagggcgaggtctgctctgacatctctctgagatctgagatctgatacctgcaggataacttcgtataatgtatgctatacgaagttatgtcacagtatcggcatctctgtctcgacgacagtgagtatagtcaactatgctatctagtagccaaagtaagtctacattccgggctttgcaggggttagctatttcattagacaatacttacaaccttcgaagggcttccccagaattcaattctatattgattcaatatccacccatcggacccgctctccgtaccccctgttcgcttcgccactacaaccatgtcaagacctgagaatcgtagcaaattgccccactacggcccgagtgctgtcggctggttaaagtagaatgacttgggtagccagatcgagacgcctgacattgatacgcagacagcgcagtcagtttcaaactgacaactgacgcgtactggattgacaggactccttggccggtgccattcgaatcgcttgtagacctcttgccagcatcttgccagagaagcttgaaggctggatcgctcagcctgagctcacacttagtagctccactagtcactcaggtgctcagcctctcctcagcgcctcaagctcaagcctcagggcctcagctgcatcgagctctggtgccagtgccagtgccagtgccagtgccagtgccagtgccagtgccagtgaagagagtggtatgagccaagctatacccaaaagcaaatgatggttattgccagcttccatgcacccctggggcgaaggacaacgaacaacagacagagtttgaattattcactggcctagtactaccaatttaaatttggtggttcagcgcaggaacggcgcgagtgagcgtaagggcaaactccgcatggggcgtgacgtcagtgtccctctggctgaggcactccagcaggctctggtcaacgcatcaacgtgtgtgtgtgtctaccaagcacattgtgcgctcgctgtccgtgcgccgaaatcgcaccagtcagaacgtctataaaacccctcttgcttggagggttaccgggccgtcttttcccaacgctccggctcactcactactctacacaacaaatgtcccctcctgcaatcgtgttcaccgactgggatggaactgttacacttcaagactcgaacgatgtcctgacagacaaccttggctttggttacgaaaagcgaaaagttctcaatgatcgtatgttgaatgaaacgctgtctttccgtgaaggtttcgacgagatgcttcgatccatccctgcgaatggtcactcttttcaggaatgtgttgactaccttttgcaacatatcaaactggaccctggttttaaggaattctactactggtgccatgaaaatggtatccctatctacgttatctcgtctggcatgtcgccgattattgaggctctcctgaagaaactcctgggccagcaggttatgaaccacgttactattatcagcaacggtgtcgagattaacggcaacgactggcacatcgtctatcgagacgacacaccttttggtcacgacaaggcagcctccattaaacagtgtctcatgaactacgatctctctaaaaagccatatttgttctattgcggagatggcgtttctgacctttctgcggccaagtcgtgtgacctgctctttgcgcgtcgcggcaaagatctggtcaccttttgcattaaacagaagatccatttcactcaatttgatacgttccgcgatatcctctcggacatccaaaaaattgtttccggagaaaaaaagttggaagattgctttgagtaacacggatcaacaaaaatgtgcgccagctttgttgtgtgcccttttcctctagcggatcctatccacatttcgtgaatgaaccgattaagctctgacgagatttccttgttttctgtagatacctcttgtagaggtgtcaaagttatgttgtgatcgagagagttacctgcaaggtattatgcaagcggcttgatgaggacactcaactacgtgtgagtaggagtgcgttgctcagcagttgacgcgtgagccgcttgagcagcttgataaaggtcctaatcgtcttccagctgttggcagacgacaatgtgctgtagtagtaggataggcccgtaaaagtgtagaagcaataggttgagactgactgtaatgggtacttgcgttcaaagactgaaagtccaaaggattgctcaaaggcccctgaggtctgagcctctgagcgcgctcttcgtcaaaattcgccggggccatcggtcatcctctcgagggcagcatcttcctgcttgaagactgagtccgtctcaggcttgctggtcacattattgtcagtacctaccatgaagaattcaatattattttacattgtcaaccattacatggatcccatgttgtgcatagcctctatgtcatcctttggtcttttatgtctgtagcgtgctagtagtattcaagttgtagcactgctgtgaaacagtacgttcaagtagtgtgcagcagtacgttcagttagtggactggggcagcctcgccttcagcaaaggttaggtacatgagccagttgctcactcttgctttctacgaatcccataggctactttgccccctaaccgtgacgaccccctgtgtttgagaagtttgagtctttttacgttaccgtgaccaagcgagcagagtagaaactcttgaagttgtgtatgtaagaatacaaattgagaacacaaggttacctacctttatagttggtaaacagcaagcaataccagagattttcatcgcaacgtgactctatcattcactatattaagttgcacacggatgttgtacaacactacacgtaaaagagagaaaaatactaatgtcgatcgctcaggt

SEQ ID NO: 246 - DNA, 717 bp, synthetic construct
  source 1..717: mol_type = other DNA
atgtcccctcctgcaatcgtgttcaccgactgggatggaactgttacacttcaagactcgaacgatgtcctgacagacaaccttggctttggttacgaaaagcgaaaagttctcaatgatcgtatgttgaatgaaacgctgtctttccgtgaaggtttcgacgagatgcttcgatccatccctgcgaatggtcactcttttcaggaatgtgttgactaccttttgcaacatatcaaactggaccctggttttaaggaattctactactggtgccatgaaaatggtatccctatctacgttatctcgtctggcatgtcgccgattattgaggctctcctgaagaaactcctgggccagcaggttatgaaccacgttactattatcagcaacggtgtcgagattaacggcaacgactggcacatcgtctatcgagacgacacaccttttggtcacgacaaggcagcctccattaaacagtgtctcatgaactacgatctctctaaaaagccatatttgttctattgcggagatggcgtttctgacctttctgcggccaagtcgtgtgacctgctctttgcgcgtcgcggcaaagatctggtcaccttttgcattaaacagaagatccatttcactcaatttgatacgttccgcgatatcctctcggacatccaaaaaattgtttccggagaaaaaaagttggaagattgctttgagtaa

SEQ ID NO: 247 - DNA, 3724 bp, synthetic construct
  source 1..3724: mol_type = other DNA
agatgtagccggcgctgtagagttttggacggataggttgggtttcagtcgagacttcgttgaagatgactttgcaggcgtcgtgcgtgatgatgtgaccctgtttatctcggccgttcaagatcaagttgtccctgacaatacacttgcatgggtctgggtacgcggattagatgaattgtacgcggaatggtctgaagttgtatccactaactttcgtgacgcttcaggtcctgctatgactgagattggtgaacaaccctgggggcgtgagttcgcactccgagatccagctggaaattgtgttcatttcgtagctgaggaacaggattaatggtgttcaccactgttgcttcccctttgttggagcgtccgtcgttctgatggcgctctgagcccaaaatatcccttcttcgcccgagagcaagcctcggagtgtgcttgcaatctacttttcctactaaagttatcttcttgtggcttctgaatttgaatagaacgtgttcagacttgttagctaaatttgttgatgcgagatacttgacagaatcccgttgatgaactcatctgtgtgaccaccgcctggtgatggaatctcgcgcggaagccgtggtgttactgactctcaagcaattcagtagataaatttgtataacatcattgcaaggggtgctagcaatcaattgtccaataccaaacggcggcaagtgcaaaggggcgatagagagtttctgcgaggaagggaaggaatccgtatgcctgaaaacttttgtacaagtgtctttgtaagggcgaggtctgctctgacatctctctgagatctgagatctgatacctgcaggataacttcgtataatgtatgctatacgaagttatgtcacagtatcggcatctctgtctcgacgacagtgagtatagtcaactatgctatctagtagccaaagtaagtctacattccgggctttgcaggggttagctatttcattagacaatacttacaaccttcgaagggcttccccagaattcaattctatattgattcaatatccacccatcggacccgctctccgtaccccctgttcgcttcgccactacaaccatgtcaagacctgagaatcgtagcaaattgccccactacggcccgagtgctgtcggctggttaaagtagaatgacttgggtagccagatcgagacgcctgacattgatacgcagacagcgcagtcagtttcaaactgacaactgacgcgtactggattgacaggactccttggccggtgccattcgaatcgcttgtagacctcttgccagcatcttgccagagaagcttgaaggctggatcgctcagcctgagctcacacttagtagctccactagtcactcaggtgctcagcctctcctcagcgcctcaagctcaagcctcagggcctcagctgcatcgagctctggtgccagtgccagtgccagtgccagtgccagtgccagtgccagtgccagtgaagagagtggtatgagccaagctatacccaaaagcaaatgatggttattgccagcttccatgcacccctggggcgaaggacaacgaacaacagacagagtttgaattattcactggcctagtactaccaatttaaatttggtggttcagcgcaggaacggcgcgagtgagcgtaagggcaaactccgcatggggcgtgacgtcagtgtccctctggctgaggcactccagcaggctctggtcaacgcatcaacgtgtgtgtgtgtctaccaagcacattgtgcgctcgctgtccgtgcgccgaaatcgcaccagtcagaacgtctataaaacccctcttgcttggagggttaccgggccgtcttttcccaacgctccggctcactcactactctacacaacaaatgtcgggtcccccggcaatcgtgtttacagactgggatggtactgttactttgcaggactccaatgactatctgactgagaatttgggatttggcaagcctcgacgcctggagattaacgatgagattttgaatgaacgcgtgtccttccaagagggattcacggagatgcttaaatccatccctacaccatttcccgagtgtatcgaataccttttgaaacacattcaactggaccctggatttaaggatttctatcactggtgttttgagcgtaacatcccagtgattgttatctcctccggtatgaaaccgatcatccacgcgttgctgaagaaccttgttggtgatgaagcaattaaaaacattgaaatcattagcaatgaagttgatgtcaaagcggatggctcttggaacatcgtttacaaggaccctgaaacctccttcggtcatgataagtctaaatccattcgcgagtatcttgagcgcaacggatactcctcccagaatgtgcctttgctgttttactgtggtgacggtgtgtccgacctctcggctgcgaaggaaactaaccttctcttcgctaaacacggcaaggacctgattacatattgtaaccgagaaaacattccctacaccgaattcaactcgttcgaagatatcctgtccaaggtcaccaagattgtcgaggccaagggcaaaaacatcaacgagttcctcgagaaccactaacacggatcaacaaaaatgtgcgccagctttgttgtgtgcccttttcctctagcggatcctatccacatttcgtgaatgaaccgattaagctctgacgagatttccttgttttctgtagatacctcttgtagaggtgtcaaagttatgttgtgatcgagagagttacctgcaaggtattatgcaagcggcttgatgaggacactcaactacgtgtgagtaggagtgcgttgctcagcagttgacgcgtgagccgcttgagcagcttgataaaggtcctaatcgtcttccagctgttggcagacgacaatgtgctgtagtagtaggataggcccgtaaaagtgtagaagcaataggttgagactgactgtaatgggtacttgcgttcaaagactgaaagtccaaaggattgctcaaaggcccctgaggtctgagcctctgagcgcgctcttcgtcaaaattcgccggggccatcggtcatcctctcgagggcagcatcttcctgcttgaagactgagtccgtctcaggcttgctggtcacattattgtcagtacctaccatgaagaattcaatattattttacattgtcaaccattacatggatcccatgttgtgcatagcctctatgtcatcctttggtcttttatgtctgtagcgtgctagtagtattcaagttgtagcactgctgtgaaacagtacgttcaagtagtgtgcagcagtacgttcagttagtggactggggcagcctcgccttcagcaaaggttaggtacatgagccagttgctcactcttgctttctacgaatcccataggctactttgccccctaaccgtgacgaccccctgtgtttgagaagtttgagtctttttacgttaccgtgaccaagcgagcagagtagaaactcttgaagttgtgtatgtaagaatacaaattgagaacacaaggttacctacctttatagttggtaaacagcaagcaataccagagattttcatcgcaacgtgactctatcattcactatattaagttgcacacggatgttgtacaacactacacgtaaaagagagaaaaatactaatgtcgatcgctcaggt

SEQ ID NO: 248 - DNA, 732 bp, synthetic construct
  source 1..732: mol_type = other DNA
atgtcgggtcccccggcaatcgtgtttacagactgggatggtactgttactttgcaggactccaatgactatctgactgagaatttgggatttggcaagcctcgacgcctggagattaacgatgagattttgaatgaacgcgtgtccttccaagagggattcacggagatgcttaaatccatccctacaccatttcccgagtgtatcgaataccttttgaaacacattcaactggaccctggatttaaggatttctatcactggtgttttgagcgtaacatcccagtgattgttatctcctccggtatgaaaccgatcatccacgcgttgctgaagaaccttgttggtgatgaagcaattaaaaacattgaaatcattagcaatgaagttgatgtcaaagcggatggctcttggaacatcgtttacaaggaccctgaaacctccttcggtcatgataagtctaaatccattcgcgagtatcttgagcgcaacggatactcctcccagaatgtgcctttgctgttttactgtggtgacggtgtgtccgacctctcggctgcgaaggaaactaaccttctcttcgctaaacacggcaaggacctgattacatattgtaaccgagaaaacattccctacaccgaattcaactcgttcgaagatatcctgtccaaggtcaccaagattgtcgaggccaagggcaaaaacatcaacgagttcctcgagaaccactaa

SEQ ID NO: 249 - DNA, 3796 bp, synthetic construct
  source 1..3796: mol_type = other DNA
agatgtagccggcgctgtagagttttggacggataggttgggtttcagtcgagacttcgttgaagatgactttgcaggcgtcgtgcgtgatgatgtgaccctgtttatctcggccgttcaagatcaagttgtccctgacaatacacttgcatgggtctgggtacgcggattagatgaattgtacgcggaatggtctgaagttgtatccactaactttcgtgacgcttcaggtcctgctatgactgagattggtgaacaaccctgggggcgtgagttcgcactccgagatccagctggaaattgtgttcatttcgtagctgaggaacaggattaatggtgttcaccactgttgcttcccctttgttggagcgtccgtcgttctgatggcgctctgagcccaaaatatcccttcttcgcccgagagcaagcctcggagtgtgcttgcaatctacttttcctactaaagttatcttcttgtggcttctgaatttgaatagaacgtgttcagacttgttagctaaatttgttgatgcgagatacttgacagaatcccgttgatgaactcatctgtgtgaccaccgcctggtgatggaatctcgcgcggaagccgtggtgttactgactctcaagcaattcagtagataaatttgtataacatcattgcaaggggtgctagcaatcaattgtccaataccaaacggcggcaagtgcaaaggggcgatagagagtttctgcgaggaagggaaggaatccgtatgcctgaaaacttttgtacaagtgtctttgtaagggcgaggtctgctctgacatctctctgagatctgagatctgatacctgcaggataacttcgtataatgtatgctatacgaagttatgtcacagtatcggcatctctgtctcgacgacagtgagtatagtcaactatgctatctagtagccaaagtaagtctacattccgggctttgcaggggttagctatttcattagacaatacttacaaccttcgaagggcttccccagaattcaattctatattgattcaatatccacccatcggacccgctctccgtaccccctgttcgcttcgccactacaaccatgtcaagacctgagaatcgtagcaaattgccccactacggcccgagtgctgtcggctggttaaagtagaatgacttgggtagccagatcgagacgcctgacattgatacgcagacagcgcagtcagtttcaaactgacaactgacgcgtactggattgacaggactccttggccggtgccattcgaatcgcttgtagacctcttgccagcatcttgccagagaagcttgaaggctggatcgctcagcctgagctcacacttagtagctccactagtcactcaggtgctcagcctctcctcagcgcctcaagctcaagcctcagggcctcagctgcatcgagctctggtgccagtgccagtgccagtgccagtgccagtgccagtgccagtgccagtgaagagagtggtatgagccaagctatacccaaaagcaaatgatggttattgccagcttccatgcacccctggggcgaaggacaacgaacaacagacagagtttgaattattcactggcctagtactaccaatttaaatttggtggttcagcgcaggaacggcgcgagtgagcgtaagggcaaactccgcatggggcgtgacgtcagtgtccctctggctgaggcactccagcaggctctggtcaacgcatcaacgtgtgtgtgtgtctaccaagcacattgtgcgctcgctgtccgtgcgccgaaatcgcaccagtcagaacgtctataaaacccctcttgcttggagggttaccgggccgtcttttcccaacgctccggctcactcactactctacacaacaaatgggctcgacgactacgacacttccagcaatgaagacctctccaaaatacgttttctttaccgacttcgatggcacaattacaacgcgtgactctaacgactttatgacggataacttgggcttcggtcaagaactgcgtaagcagggaaaccgcgatgtccttgacggacgcaagacgtttcgcgactcgttccagtcgatgatggacagcatcaaaaccccgtattctaaatgtattgagacgcttattgagaacattaaattggatccaggcttcaaagagttctacgagtgggcacgcgaaaacaacatcccggtggttattcttagcggcggcatggagcccattatccgagccctgctcgaacatctcctgggcaaaaaagaggcagcagaaatccagatcgtcagcaatcaagttgaggtgcgcaagggatttaagtccctggatgaagaaggtggttggaacattgtctatcacgatgagtcgcattttggccacgacaagtctcgcgaaattcgtccctatgcagagctgcctgatgaccagcgaccgactatgttttacgccggtgacggagtgtctgacctgtcggccgctaaagagacggacctgctgtttgcgaagaagggtcacgatctgatcacgtattgcgtccgagaaaaggttccatttactattttcgaggactggacgtcgattctttccactgtccaggacgtcgtggcaggaaaaaccacagtgaaggaagtgtacgcggccggaattaaggattttgaacaaggtgcagacaaggcctaacacggatcaacaaaaatgtgcgccagctttgttgtgtgcccttttcctctagcggatcctatccacatttcgtgaatgaaccgattaagctctgacgagatttccttgttttctgtagatacctcttgtagaggtgtcaaagttatgttgtgatcgagagagttacctgcaaggtattatgcaagcggcttgatgaggacactcaactacgtgtgagtaggagtgcgttgctcagcagttgacgcgtgagccgcttgagcagcttgataaaggtcctaatcgtcttccagctgttggcagacgacaatgtgctgtagtagtaggataggcccgtaaaagtgtagaagcaataggttgagactgactgtaatgggtacttgcgttcaaagactgaaagtccaaaggattgctcaaaggcccctgaggtctgagcctctgagcgcgctcttcgtcaaaattcgccggggccatcggtcatcctctcgagggcagcatcttcctgcttgaagactgagtccgtctcaggcttgctggtcacattattgtcagtacctaccatgaagaattcaatattattttacattgtcaaccattacatggatcccatgttgtgcatagcctctatgtcatcctttggtcttttatgtctgtagcgtgctagtagtattcaagttgtagcactgctgtgaaacagtacgttcaagtagtgtgcagcagtacgttcagttagtggactggggcagcctcgccttcagcaaaggttaggtacatgagccagttgctcactcttgctttctacgaatcccataggctactttgccccctaaccgtgacgaccccctgtgtttgagaagtttgagtctttttacgttaccgtgaccaagcgagcagagtagaaactcttgaagttgtgtatgtaagaatacaaattgagaacacaaggttacctacctttatagttggtaaacagcaagcaataccagagattttcatcgcaacgtgactctatcattcactatattaagttgcacacggatgttgtacaacactacacgtaaaagagagaaaaatactaatgtcgatcgctcaggt

SEQ ID NO: 250 - DNA, 804 bp, synthetic construct
  source 1..804: mol_type = other DNA
atgggctcgacgactacgacacttccagcaatgaagacctctccaaaatacgttttctttaccgacttcgatggcacaattacaacgcgtgactctaacgactttatgacggataacttgggcttcggtcaagaactgcgtaagcagggaaaccgcgatgtccttgacggacgcaagacgtttcgcgactcgttccagtcgatgatggacagcatcaaaaccccgtattctaaatgtattgagacgcttattgagaacattaaattggatccaggcttcaaagagttctacgagtgggcacgcgaaaacaacatcccggtggttattcttagcggcggcatggagcccattatccgagccctgctcgaacatctcctgggcaaaaaagaggcagcagaaatccagatcgtcagcaatcaagttgaggtgcgcaagggatttaagtccctggatgaagaaggtggttggaacattgtctatcacgatgagtcgcattttggccacgacaagtctcgcgaaattcgtccctatgcagagctgcctgatgaccagcgaccgactatgttttacgccggtgacggagtgtctgacctgtcggccgctaaagagacggacctgctgtttgcgaagaagggtcacgatctgatcacgtattgcgtccgagaaaaggttccatttactattttcgaggactggacgtcgattctttccactgtccaggacgtcgtggcaggaaaaaccacagtgaaggaagtgtacgcggccggaattaaggattttgaacaaggtgcagacaaggcctaa

SEQ ID NO: 251 - DNA, 3757 bp, synthetic construct
  source 1..3757: mol_type = other DNA
agatgtagccggcgctgtagagttttggacggataggttgggtttcagtcgagacttcgttgaagatgactttgcaggcgtcgtgcgtgatgatgtgaccctgtttatctcggccgttcaagatcaagttgtccctgacaatacacttgcatgggtctgggtacgcggattagatgaattgtacgcggaatggtctgaagttgtatccactaactttcgtgacgcttcaggtcctgctatgactgagattggtgaacaaccctgggggcgtgagttcgcactccgagatccagctggaaattgtgttcatttcgtagctgaggaacaggattaatggtgttcaccactgttgcttcccctttgttggagcgtccgtcgttctgatggcgctctgagcccaaaatatcccttcttcgcccgagagcaagcctcggagtgtgcttgcaatctacttttcctactaaagttatcttcttgtggcttctgaatttgaatagaacgtgttcagacttgttagctaaatttgttgatgcgagatacttgacagaatcccgttgatgaactcatctgtgtgaccaccgcctggtgatggaatctcgcgcggaagccgtggtgttactgactctcaagcaattcagtagataaatttgtataacatcattgcaaggggtgctagcaatcaattgtccaataccaaacggcggcaagtgcaaaggggcgatagagagtttctgcgaggaagggaaggaatccgtatgcctgaaaacttttgtacaagtgtctttgtaagggcgaggtctgctctgacatctctctgagatctgagatctgatacctgcaggataacttcgtataatgtatgctatacgaagttatgtcacagtatcggcatctctgtctcgacgacagtgagtatagtcaactatgctatctagtagccaaagtaagtctacattccgggctttgcaggggttagctatttcattagacaatacttacaaccttcgaagggcttccccagaattcaattctatattgattcaatatccacccatcggacccgctctccgtaccccctgttcgcttcgccactacaaccatgtcaagacctgagaatcgtagcaaattgccccactacggcccgagtgctgtcggctggttaaagtagaatgacttgggtagccagatcgagacgcctgacattgatacgcagacagcgcagtcagtttcaaactgacaactgacgcgtactggattgacaggactccttggccggtgccattcgaatcgcttgtagacctcttgccagcatcttgccagagaagcttgaaggctggatcgctcagcctgagctcacacttagtagctccactagtcactcaggtgctcagcctctcctcagcgcctcaagctcaagcctcagggcctcagctgcatcgagctctggtgccagtgccagtgccagtgccagtgccagtgccagtgccagtgccagtgaagagagtggtatgagccaagctatacccaaaagcaaatgatggttattgccagcttccatgcacccctggggcgaaggacaacgaacaacagacagagtttgaattattcactggcctagtactaccaatttaaatttggtggttcagcgcaggaacggcgcgagtgagcgtaagggcaaactccgcatggggcgtgacgtcagtgtccctctggctgaggcactccagcaggctctggtcaacgcatcaacgtgtgtgtgtgtctaccaagcacattgtgcgctcgctgtccgtgcgccgaaatcgcaccagtcagaacgtctataaaacccctcttgcttggagggttaccgggccgtcttttcccaacgctccggctcactcactactctacacaacaaatgggagattcctccttcctgtcgcttcccgccatgcaaacctctccacagtccatcgtgttcacagactgggacggaaccgttaccctggaggattctaacgattttttgacagataaccttggttatggtgtcgaacgtcgaaagtggcttaatcaacaggtccttgaaggaaaatggaccttccgcgactccttcatggatatgctccaatctatcaacactccattgccagaatgcatcgcctatttgaaacaacatgtgaagctcgaccccggctttttggctttctatacatggtgtaaaagccacaacattccggttattatcgtttcctcgggtatgactccaatcattcgcgcactgcttgaggatttggttggcatggacgcagccctcgacatccagattgtctccaatgatgttgcgattgacgacgcgggtaagtggaaaattgtctatcgagacgactcgccttttggccacgacaagtctcttgcaattaagccctacgctaatttggacccggcagtccgccctactctcttctactgtggtgacggagtctccgacctttctgccgctcgtgaaactgatcttttgttcgccaagaaaggccgcgacctggtcacttactgtgaacgtgagaacatcgcctacaatgtttttgattccttcgcagatatccataagcgtgtcaaggctattgttgaagacaatagcttgacgctcgaacaggcggttgctcagaaggagattttgtaacacggatcaacaaaaatgtgcgccagctttgttgtgtgcccttttcctctagcggatcctatccacatttcgtgaatgaaccgattaagctctgacgagatttccttgttttctgtagatacctcttgtagaggtgtcaaagttatgttgtgatcgagagagttacctgcaaggtattatgcaagcggcttgatgaggacactcaactacgtgtgagtaggagtgcgttgctcagcagttgacgcgtgagccgcttgagcagcttgataaaggtcctaatcgtcttccagctgttggcagacgacaatgtgctgtagtagtaggataggcccgtaaaagtgtagaagcaataggttgagactgactgtaatgggtacttgcgttcaaagactgaaagtccaaaggattgctcaaaggcccctgaggtctgagcctctgagcgcgctcttcgtcaaaattcgccggggccatcggtcatcctctcgagggcagcatcttcctgcttgaagactgagtccgtctcaggcttgctggtcacattattgtcagtacctaccatgaagaattcaatattattttacattgtcaaccattacatggatcccatgttgtgcatagcctctatgtcatcctttggtcttttatgtctgtagcgtgctagtagtattcaagttgtagcactgctgtgaaacagtacgttcaagtagtgtgcagcagtacgttcagttagtggactggggcagcctcgccttcagcaaaggttaggtacatgagccagttgctcactcttgctttctacgaatcccataggctactttgccccctaaccgtgacgaccccctgtgtttgagaagtttgagtctttttacgttaccgtgaccaagcgagcagagtagaaactcttgaagttgtgtatgtaagaatacaaattgagaacacaaggttacctacctttatagttggtaaacagcaagcaataccagagattttcatcgcaacgtgactctatcattcactatattaagttgcacacggatgttgtacaacactacacgtaaaagagagaaaaatactaatgtcgatcgctcaggt

SEQ ID NO: 252 - DNA, 765 bp, synthetic construct
  source 1..765: mol_type = other DNA
atgggagattcctccttcctgtcgcttcccgccatgcaaacctctccacagtccatcgtgttcacagactgggacggaaccgttaccctggaggattctaacgattttttgacagataaccttggttatggtgtcgaacgtcgaaagtggcttaatcaacaggtccttgaaggaaaatggaccttccgcgactccttcatggatatgctccaatctatcaacactccattgccagaatgcatcgcctatttgaaacaacatgtgaagctcgaccccggctttttggctttctatacatggtgtaaaagccacaacattccggttattatcgtttcctcgggtatgactccaatcattcgcgcactgcttgaggatttggttggcatggacgcagccctcgacatccagattgtctccaatgatgttgcgattgacgacgcgggtaagtggaaaattgtctatcgagacgactcgccttttggccacgacaagtctcttgcaattaagccctacgctaatttggacccggcagtccgccctactctcttctactgtggtgacggagtctccgacctttctgccgctcgtgaaactgatcttttgttcgccaagaaaggccgcgacctggtcacttactgtgaacgtgagaacatcgcctacaatgtttttgattccttcgcagatatccataagcgtgtcaaggctattgttgaagacaatagcttgacgctcgaacaggcggttgctcagaaggagattttgtaa

SEQ ID NO: 253 - DNA, 3628 bp, synthetic construct
  source 1..3628: mol_type = other DNA
agatgtagccggcgctgtagagttttggacggataggttgggtttcagtcgagacttcgttgaagatgactttgcaggcgtcgtgcgtgatgatgtgaccctgtttatctcggccgttcaagatcaagttgtccctgacaatacacttgcatgggtctgggtacgcggattagatgaattgtacgcggaatggtctgaagttgtatccactaactttcgtgacgcttcaggtcctgctatgactgagattggtgaacaaccctgggggcgtgagttcgcactccgagatccagctggaaattgtgttcatttcgtagctgaggaacaggattaatggtgttcaccactgttgcttcccctttgttggagcgtccgtcgttctgatggcgctctgagcccaaaatatcccttcttcgcccgagagcaagcctcggagtgtgcttgcaatctacttttcctactaaagttatcttcttgtggcttctgaatttgaatagaacgtgttcagacttgttagctaaatttgttgatgcgagatacttgacagaatcccgttgatgaactcatctgtgtgaccaccgcctggtgatggaatctcgcgcggaagccgtggtgttactgactctcaagcaattcagtagataaatttgtataacatcattgcaaggggtgctagcaatcaattgtccaataccaaacggcggcaagtgcaaaggggcgatagagagtttctgcgaggaagggaaggaatccgtatgcctgaaaacttttgtacaagtgtctttgtaagggcgaggtctgctctgacatctctctgagatctgagatctgatacctgcaggataacttcgtataatgtatgctatacgaagttatgtcacagtatcggcatctctgtctcgacgacagtgagtatagtcaactatgctatctagtagccaaagtaagtctacattccgggctttgcaggggttagctatttcattagacaatacttacaaccttcgaagggcttccccagaattcaattctatattgattcaatatccacccatcggacccgctctccgtaccccctgttcgcttcgccactacaaccatgtcaagacctgagaatcgtagcaaattgccccactacggcccgagtgctgtcggctggttaaagtagaatgacttgggtagccagatcgagacgcctgacattgatacgcagacagcgcagtcagtttcaaactgacaactgacgcgtactggattgacaggactccttggccggtgccattcgaatcgcttgtagacctcttgccagcatcttgccagagaagcttgaaggctggatcgctcagcctgagctcacacttagtagctccactagtcactcaggtgctcagcctctcctcagcgcctcaagctcaagcctcagggcctcagctgcatcgagctctggtgccagtgccagtgccagtgccagtgccagtgccagtgccagtgccagtgaagagagtggtatgagccaagctatacccaaaagcaaatgatggttattgccagcttccatgcacccctggggcgaaggacaacgaacaacagacagagtttgaattattcactggcctagtactaccaatttaaatttggtggttcagcgcaggaacggcgcgagtgagcgtaagggcaaactccgcatggggcgtgacgtcagtgtccctctggctgaggcactccagcaggctctggtcaacgcatcaacgtgtgtgtgtgtctaccaagcacattgtgcgctcgctgtccgtgcgccgaaatcgcaccagtcagaacgtctataaaacccctcttgcttggagggttaccgggccgtcttttcccaacgctccggctcactcactactctacacaacaaatgttgcttccatgtgacggcgtcctcttcgatgtggacggaacactcgttgactcgaccccacttattgagcgcgctgcgcgtgtgtgggctcccgaatatggcattgaccctgatgcctatttggcacgcgcacatggccgacgtacttccgatagcattgctgatttccttccagctggtcaagtgcgtgcggctactgaacgacttgatgctctggaagctgcggaggtggcaggtgtcaccgcccttccaggagttgtggacctcctttcttccctgcgaggactgccctgggccgttgtcacctccatggaccctggtcagctgacagcgcgcgctggcgctgcaggagttccccttcctaaagttgccgttactgcgcgcgatgtggccgccggtaaaccagaccctgctggttatctgctcgcagctcgacgactcggtctggaccctgctcgctgcgtcgttgtggaagatgctcctgccggagttgcagcgggtcgagccgctggcgcaaccgtggtcgctttgaccacgtctcatagccgagctgacttggcggaagctgacgttattgttcccgacctgaccgcggttactgctgagcctggcggcttgcgcgtgcgcgcgtaacacggatcaacaaaaatgtgcgccagctttgttgtgtgcccttttcctctagcggatcctatccacatttcgtgaatgaaccgattaagctctgacgagatttccttgttttctgtagatacctcttgtagaggtgtcaaagttatgttgtgatcgagagagttacctgcaaggtattatgcaagcggcttgatgaggacactcaactacgtgtgagtaggagtgcgttgctcagcagttgacgcgtgagccgcttgagcagcttgataaaggtcctaatcgtcttccagctgttggcagacgacaatgtgctgtagtagtaggataggcccgtaaaagtgtagaagcaataggttgagactgactgtaatgggtacttgcgttcaaagactgaaagtccaaaggattgctcaaaggcccctgaggtctgagcctctgagcgcgctcttcgtcaaaattcgccggggccatcggtcatcctctcgagggcagcatcttcctgcttgaagactgagtccgtctcaggcttgctggtcacattattgtcagtacctaccatgaagaattcaatattattttacattgtcaaccattacatggatcccatgttgtgcatagcctctatgtcatcctttggtcttttatgtctgtagcgtgctagtagtattcaagttgtagcactgctgtgaaacagtacgttcaagtagtgtgcagcagtacgttcagttagtggactggggcagcctcgccttcagcaaaggttaggtacatgagccagttgctcactcttgctttctacgaatcccataggctactttgccccctaaccgtgacgaccccctgtgtttgagaagtttgagtctttttacgttaccgtgaccaagcgagcagagtagaaactcttgaagttgtgtatgtaagaatacaaattgagaacacaaggttacctacctttatagttggtaaacagcaagcaataccagagattttcatcgcaacgtgactctatcattcactatattaagttgcacacggatgttgtacaacactacacgtaaaagagagaaaaatactaatgtcgatcgctcaggt

SEQ ID NO: 254 - DNA, 636 bp, synthetic construct
  source 1..636: mol_type = other DNA
atgttgcttccatgtgacggcgtcctcttcgatgtggacggaacactcgttgactcgaccccacttattgagcgcgctgcgcgtgtgtgggctcccgaatatggcattgaccctgatgcctatttggcacgcgcacatggccgacgtacttccgatagcattgctgatttccttccagctggtcaagtgcgtgcggctactgaacgacttgatgctctggaagctgcggaggtggcaggtgtcaccgcccttccaggagttgtggacctcctttcttccctgcgaggactgccctgggccgttgtcacctccatggaccctggtcagctgacagcgcgcgctggcgctgcaggagttccccttcctaaagttgccgttactgcgcgcgatgtggccgccggtaaaccagaccctgctggttatctgctcgcagctcgacgactcggtctggaccctgctcgctgcgtcgttgtggaagatgctcctgccggagttgcagcgggtcgagccgctggcgcaaccgtggtcgctttgaccacgtctcatagccgagctgacttggcggaagctgacgttattgttcccgacctgaccgcggttactgctgagcctggcggcttgcgcgtgcgcgcgtaa

SEQ ID NO: 255 - DNA, 3643 bp, synthetic construct
  source 1..3643: mol_type = other DNA
agatgtagccggcgctgtagagttttggacggataggttgggtttcagtcgagacttcgttgaagatgactttgcaggcgtcgtgcgtgatgatgtgaccctgtttatctcggccgttcaagatcaagttgtccctgacaatacacttgcatgggtctgggtacgcggattagatgaattgtacgcggaatggtctgaagttgtatccactaactttcgtgacgcttcaggtcctgctatgactgagattggtgaacaaccctgggggcgtgagttcgcactccgagatccagctggaaattgtgttcatttcgtagctgaggaacaggattaatggtgttcaccactgttgcttcccctttgttggagcgtccgtcgttctgatggcgctctgagcccaaaatatcccttcttcgcccgagagcaagcctcggagtgtgcttgcaatctacttttcctactaaagttatcttcttgtggcttctgaatttgaatagaacgtgttcagacttgttagctaaatttgttgatgcgagatacttgacagaatcccgttgatgaactcatctgtgtgaccaccgcctggtgatggaatctcgcgcggaagccgtggtgttactgactctcaagcaattcagtagataaatttgtataacatcattgcaaggggtgctagcaatcaattgtccaataccaaacggcggcaagtgcaaaggggcgatagagagtttctgcgaggaagggaaggaatccgtatgcctgaaaacttttgtacaagtgtctttgtaagggcgaggtctgctctgacatctctctgagatctgagatctgatacctgcaggataacttcgtataatgtatgctatacgaagttatgtcacagtatcggcatctctgtctcgacgacagtgagtatagtcaactatgctatctagtagccaaagtaagtctacattccgggctttgcaggggttagctatttcattagacaatacttacaaccttcgaagggcttccccagaattcaattctatattgattcaatatccacccatcggacccgctctccgtaccccctgttcgcttcgccactacaaccatgtcaagacctgagaatcgtagcaaattgccccactacggcccgagtgctgtcggctggttaaagtagaatgacttgggtagccagatcgagacgcctgacattgatacgcagacagcgcagtcagtttcaaactgacaactgacgcgtactggattgacaggactccttggccggtgccattcgaatcgcttgtagacctcttgccagcatcttgccagagaagcttgaaggctggatcgctcagcctgagctcacacttagtagctccactagtcactcaggtgctcagcctctcctcagcgcctcaagctcaagcctcagggcctcagctgcatcgagctctggtgccagtgccagtgccagtgccagtgccagtgccagtgccagtgccagtgaagagagtggtatgagccaagctatacccaaaagcaaatgatggttattgccagcttccatgcacccctggggcgaaggacaacgaacaacagacagagtttgaattattcactggcctagtactaccaatttaaatttggtggttcagcgcaggaacggcgcgagtgagcgtaagggcaaactccgcatggggcgtgacgtcagtgtccctctggctgaggcactccagcaggctctggtcaacgcatcaacgtgtgtgtgtgtctaccaagcacattgtgcgctcgctgtccgtgcgccgaaatcgcaccagtcagaacgtctataaaacccctcttgcttggagggttaccgggccgtcttttcccaacgctccggctcactcactactctacacaacaaatgcgctgtaaaggctttcttttcgacttggacggtacgttggtcgactcgctgcccgcagtcgagcgagcgtggtctaattgggctcgacgacatggacttgcgcccgaagaagtcctcgcatttattcatggaaaacaggctattacgtcgttgcgtcactttatggcaggaaagtccgaagcggacatcgctgccgaatttacccgcttggagcacatcgaggcaactgagactgaaggtattactgcgttgccaggcgctattgcactgctttcccatctcaataaggctggcattccatgggccatcgttacttctggttcgatgcctgtggcccgcgcccgccataagatcgctggactgcccgcaccagaggttttcgttacggccgaacgagtcaaacgcggtaagcccgagcccgatgcctatctcctcggtgcacaattgcttggcttggcgccacaggagtgtgtggtggtcgaggatgcacccgcgggtgtcctctctggactggccgctggttgccacgtcatcgcagtgaacgcaccagcggatacaccccgcctgaatgaagttgatttggtgctccattccctggaacagatcacagtcacgaagcagcctaatggcgacgtgattattcaataacacggatcaacaaaaatgtgcgccagctttgttgtgtgcccttttcctctagcggatcctatccacatttcgtgaatgaaccgattaagctctgacgagatttccttgttttctgtagatacctcttgtagaggtgtcaaagttatgttgtgatcgagagagttacctgcaaggtattatgcaagcggcttgatgaggacactcaactacgtgtgagtaggagtgcgttgctcagcagttgacgcgtgagccgcttgagcagcttgataaaggtcctaatcgtcttccagctgttggcagacgacaatgtgctgtagtagtaggataggcccgtaaaagtgtagaagcaataggttgagactgactgtaatgggtacttgcgttcaaagactgaaagtccaaaggattgctcaaaggcccctgaggtctgagcctctgagcgcgctcttcgtcaaaattcgccggggccatcggtcatcctctcgagggcagcatcttcctgcttgaagactgagtccgtctcaggcttgctggtcacattattgtcagtacctaccatgaagaattcaatattattttacattgtcaaccattacatggatcccatgttgtgcatagcctctatgtcatcctttggtcttttatgtctgtagcgtgctagtagtattcaagttgtagcactgctgtgaaacagtacgttcaagtagtgtgcagcagtacgttcagttagtggactggggcagcctcgccttcagcaaaggttaggtacatgagccagttgctcactcttgctttctacgaatcccataggctactttgccccctaaccgtgacgaccccctgtgtttgagaagtttgagtctttttacgttaccgtgaccaagcgagcagagtagaaactcttgaagttgtgtatgtaagaatacaaattgagaacacaaggttacctacctttatagttggtaaacagcaagcaataccagagattttcatcgcaacgtgactctatcattcactatattaagttgcacacggatgttgtacaacactacacgtaaaagagagaaaaatactaatgtcgatcgctcaggt

SEQ ID NO: 256 - DNA, 651 bp, synthetic construct
  source 1..651: mol_type = other DNA
atgcgctgtaaaggctttcttttcgacttggacggtacgttggtcgactcgctgcccgcagtcgagcgagcgtggtctaattgggctcgacgacatggacttgcgcccgaagaagtcctcgcatttattcatggaaaacaggctattacgtcgttgcgtcactttatggcaggaaagtccgaagcggacatcgctgccgaatttacccgcttggagcacatcgaggcaactgagactgaaggtattactgcgttgccaggcgctattgcactgctttcccatctcaataaggctggcattccatgggccatcgttacttctggttcgatgcctgtggcccgcgcccgccataagatcgctggactgcccgcaccagaggttttcgttacggccgaacgagtcaaacgcggtaagcccgagcccgatgcctatctcctcggtgcacaattgcttggcttggcgccacaggagtgtgtggtggtcgaggatgcacccgcgggtgtcctctctggactggccgctggttgccacgtcatcgcagtgaacgcaccagcggatacaccccgcctgaatgaagttgatttggtgctccattccctggaacagatcacagtcacgaagcagcctaatggcgacgtgattattcaataa

SEQ ID NO: 257 - DNA, 3688 bp, synthetic construct
  source 1..3688: mol_type = other DNA
agatgtagccggcgctgtagagttttggacggataggttgggtttcagtcgagacttcgttgaagatgactttgcaggcgtcgtgcgtgatgatgtgaccctgtttatctcggccgttcaagatcaagttgtccctgacaatacacttgcatgggtctgggtacgcggattagatgaattgtacgcggaatggtctgaagttgtatccactaactttcgtgacgcttcaggtcctgctatgactgagattggtgaacaaccctgggggcgtgagttcgcactccgagatccagctggaaattgtgttcatttcgtagctgaggaacaggattaatggtgttcaccactgttgcttcccctttgttggagcgtccgtcgttctgatggcgctctgagcccaaaatatcccttcttcgcccgagagcaagcctcggagtgtgcttgcaatctacttttcctactaaagttatcttcttgtggcttctgaatttgaatagaacgtgttcagacttgttagctaaatttgttgatgcgagatacttgacagaatcccgttgatgaactcatctgtgtgaccaccgcctggtgatggaatctcgcgcggaagccgtggtgttactgactctcaagcaattcagtagataaatttgtataacatcattgcaaggggtgctagcaatcaattgtccaataccaaacggcggcaagtgcaaaggggcgatagagagtttctgcgaggaagggaaggaatccgtatgcctgaaaacttttgtacaagtgtctttgtaagggcgaggtctgctctgacatctctctgagatctgagatctgatacctgcaggataacttcgtataatgtatgctatacgaagttatgtcacagtatcggcatctctgtctcgacgacagtgagtatagtcaactatgctatctagtagccaaagtaagtctacattccgggctttgcaggggttagctatttcattagacaatacttacaaccttcgaagggcttccccagaattcaattctatattgattcaatatccacccatcggacccgctctccgtaccccctgttcgcttcgccactacaaccatgtcaagacctgagaatcgtagcaaattgccccactacggcccgagtgctgtcggctggttaaagtagaatgacttgggtagccagatcgagacgcctgacattgatacgcagacagcgcagtcagtttcaaactgacaactgacgcgtactggattgacaggactccttggccggtgccattcgaatcgcttgtagacctcttgccagcatcttgccagagaagcttgaaggctggatcgctcagcctgagctcacacttagtagctccactagtcactcaggtgctcagcctctcctcagcgcctcaagctcaagcctcagggcctcagctgcatcgagctctggtgccagtgccagtgccagtgccagtgccagtgccagtgccagtgccagtgaagagagtggtatgagccaagctatacccaaaagcaaatgatggttattgccagcttccatgcacccctggggcgaaggacaacgaacaacagacagagtttgaattattcactggcctagtactaccaatttaaatttggtggttcagcgcaggaacggcgcgagtgagcgtaagggcaaactccgcatggggcgtgacgtcagtgtccctctggctgaggcactccagcaggctctggtcaacgcatcaacgtgtgtgtgtgtctaccaagcacattgtgcgctcgctgtccgtgcgccgaaatcgcaccagtcagaacgtctataaaacccctcttgcttggagggttaccgggccgtcttttcccaacgctccggctcactcactactctacacaacaaatgtccaagtcgatcacattggacgcagacatcatcgaatttgaccttgacggaacccttgtttacacaacgtctgtggtcgaaaaactctggtcggaacttgcgatccaacatggtgtcgatcctcatactgttctgaacgactcgcacggcgcccgcacatccgaaacctttgctaagtatttcccgatgattgacaatacggataataaagcagtggaaaagttcgaaaaagacatccctgataattacggacatttggttaaaattatcccaggcactattgagttgctgaatggtattgacaaagaccgttggtgtatcgtgacctcgggctccaattacattgctaactcctggtttaacggcattttgaaagacgtgcagaaaccgaaggtttttattaccgccgagttggtgaccaatggcaaaccagatcctgagggatatctcaaaggagataaaatcttgtccgagtccctcggtatcacttccgaacacaaaaagatcgtttttgaggacgcgcccatgggtgtcaaagctggcgttgcttccggcgcaattgtcatcggtgtgaatagcggcaataacgctaagttgctgtatgagtccggcgccagctatgtcgttaaagaccttacagacatcaaagttctggatgctaacaaagtttccctggaagttcgatacgattaacacggatcaacaaaaatgtgcgccagctttgttgtgtgcccttttcctctagcggatcctatccacatttcgtgaatgaaccgattaagctctgacgagatttccttgttttctgtagatacctcttgtagaggtgtcaaagttatgttgtgatcgagagagttacctgcaaggtattatgcaagcggcttgatgaggacactcaactacgtgtgagtaggagtgcgttgctcagcagttgacgcgtgagccgcttgagcagcttgataaaggtcctaatcgtcttccagctgttggcagacgacaatgtgctgtagtagtaggataggcccgtaaaagtgtagaagcaataggttgagactgactgtaatgggtacttgcgttcaaagactgaaagtccaaaggattgctcaaaggcccctgaggtctgagcctctgagcgcgctcttcgtcaaaattcgccggggccatcggtcatcctctcgagggcagcatcttcctgcttgaagactgagtccgtctcaggcttgctggtcacattattgtcagtacctaccatgaagaattcaatattattttacattgtcaaccattacatggatcccatgttgtgcatagcctctatgtcatcctttggtcttttatgtctgtagcgtgctagtagtattcaagttgtagcactgctgtgaaacagtacgttcaagtagtgtgcagcagtacgttcagttagtggactggggcagcctcgccttcagcaaaggttaggtacatgagccagttgctcactcttgctttctacgaatcccataggctactttgccccctaaccgtgacgaccccctgtgtttgagaagtttgagtctttttacgttaccgtgaccaagcgagcagagtagaaactcttgaagttgtgtatgtaagaatacaaattgagaacacaaggttacctacctttatagttggtaaacagcaagcaataccagagattttcatcgcaacgtgactctatcattcactatattaagttgcacacggatgttgtacaacactacacgtaaaagagagaaaaatactaatgtcgatcgctcaggt

SEQ ID NO: 258 - DNA, 696 bp, synthetic construct
  source 1..696: mol_type = other DNA
atgtccaagtcgatcacattggacgcagacatcatcgaatttgaccttgacggaacccttgtttacacaacgtctgtggtcgaaaaactctggtcggaacttgcgatccaacatggtgtcgatcctcatactgttctgaacgactcgcacggcgcccgcacatccgaaacctttgctaagtatttcccgatgattgacaatacggataataaagcagtggaaaagttcgaaaaagacatccctgataattacggacatttggttaaaattatcccaggcactattgagttgctgaatggtattgacaaagaccgttggtgtatcgtgacctcgggctccaattacattgctaactcctggtttaacggcattttgaaagacgtgcagaaaccgaaggtttttattaccgccgagttggtgaccaatggcaaaccagatcctgagggatatctcaaaggagataaaatcttgtccgagtccctcggtatcacttccgaacacaaaaagatcgtttttgaggacgcgcccatgggtgtcaaagctggcgttgcttccggcgcaattgtcatcggtgtgaatagcggcaataacgctaagttgctgtatgagtccggcgccagctatgtcgttaaagaccttacagacatcaaagttctggatgctaacaaagtttccctggaagttcgatacgattaa

SEQ ID NO: 259 - DNA, 3736 bp, synthetic construct
  source 1..3736: mol_type = other DNA
agatgtagccggcgctgtagagttttggacggataggttgggtttcagtcgagacttcgttgaagatgactttgcaggcgtcgtgcgtgatgatgtgaccctgtttatctcggccgttcaagatcaagttgtccctgacaatacacttgcatgggtctgggtacgcggattagatgaattgtacgcggaatggtctgaagttgtatccactaactttcgtgacgcttcaggtcctgctatgactgagattggtgaacaaccctgggggcgtgagttcgcactccgagatccagctggaaattgtgttcatttcgtagctgaggaacaggattaatggtgttcaccactgttgcttcccctttgttggagcgtccgtcgttctgatggcgctctgagcccaaaatatcccttcttcgcccgagagcaagcctcggagtgtgcttgcaatctacttttcctactaaagttatcttcttgtggcttctgaatttgaatagaacgtgttcagacttgttagctaaatttgttgatgcgagatacttgacagaatcccgttgatgaactcatctgtgtgaccaccgcctggtgatggaatctcgcgcggaagccgtggtgttactgactctcaagcaattcagtagataaatttgtataacatcattgcaaggggtgctagcaatcaattgtccaataccaaacggcggcaagtgcaaaggggcgatagagagtttctgcgaggaagggaaggaatccgtatgcctgaaaacttttgtacaagtgtctttgtaagggcgaggtctgctctgacatctctctgagatctgagatctgatacctgcaggataacttcgtataatgtatgctatacgaagttatgtcacagtatcggcatctctgtctcgacgacagtgagtatagtcaactatgctatctagtagccaaagtaagtctacattccgggctttgcaggggttagctatttcattagacaatacttacaaccttcgaagggcttccccagaattcaattctatattgattcaatatccacccatcggacccgctctccgtaccccctgttcgcttcgccactacaaccatgtcaagacctgagaatcgtagcaaattgccccactacggcccgagtgctgtcggctggttaaagtagaatgacttgggtagccagatcgagacgcctgacattgatacgcagacagcgcagtcagtttcaaactgacaactgacgcgtactggattgacaggactccttggccggtgccattcgaatcgcttgtagacctcttgccagcatcttgccagagaagcttgaaggctggatcgctcagcctgagctcacacttagtagctccactagtcactcaggtgctcagcctctcctcagcgcctcaagctcaagcctcagggcctcagctgcatcgagctctggtgccagtgccagtgccagtgccagtgccagtgccagtgccagtgccagtgaagagagtggtatgagccaagctatacccaaaagcaaatgatggttattgccagcttccatgcacccctggggcgaaggacaacgaacaacagacagagtttgaattattcactggcctagtactaccaatttaaatttggtggttcagcgcaggaacggcgcgagtgagcgtaagggcaaactccgcatggggcgtgacgtcagtgtccctctggctgaggcactccagcaggctctggtcaacgcatcaacgtgtgtgtgtgtctaccaagcacattgtgcgctcgctgtccgtgcgccgaaatcgcaccagtcagaacgtctataaaacccctcttgcttggagggttaccgggccgtcttttcccaacgctccggctcactcactactctacacaacaaatgccgcaattttcagtagacctctgcctctttgacttggatggcacgatcgtgtcgaccaccaccgccgctgagagcgcgtggaaaaagctgtgcagacagcatggtgtcgacccagtcgagctgttcaagcattcacacggcgcccgcagccaggagatgatgaaaaagttctttccaaagctcgacaataccgataacaagggtgtgcttgccctcgaaaaagatatcgcacactcttacttggatacagtcagtctcattcccggtgctgagaatcttttgctgtccctagacgtggataccgagactcagaaaaagctccctgagcgaaagtgggccattgtcacaagcggatcgccttacctggcgttttcctggttcgaaacgatcttgaaaaacgtcggcaagcccaaggtattcatcaccggtttcgacgtgaaaaacggtaagccagatcctgagggctattcgcgggctcgtgaccttctgaggcaagacctccagctcacgggcaagcaagatctgaaatacgtcgttttcgaagatgctccggtcggcattaaggccggcaaggcaatgggcgcgatcactgtcgggatcacgagctcttacgacaagtccgttcttttcgacgccggagcagactacgttgtgtgtgacctcacacaagtctcggttgtgaaaaacaacgaaaacggaatcgtcatccaggtgaataaccccctcactcgcgactaataacacggatcaacaaaaatgtgcgccagctttgttgtgtgcccttttcctctagcggatcctatccacatttcgtgaatgaaccgattaagctctgacgagatttccttgttttctgtagatacctcttgtagaggtgtcaaagttatgttgtgatcgagagagttacctgcaaggtattatgcaagcggcttgatgaggacactcaactacgtgtgagtaggagtgcgttgctcagcagttgacgcgtgagccgcttgagcagcttgataaaggtcctaatcgtcttccagctgttggcagacgacaatgtgctgtagtagtaggataggcccgtaaaagtgtagaagcaataggttgagactgactgtaatgggtacttgcgttcaaagactgaaagtccaaaggattgctcaaaggcccctgaggtctgagcctctgagcgcgctcttcgtcaaaattcgccggggccatcggtcatcctctcgagggcagcatcttcctgcttgaagactgagtccgtctcaggcttgctggtcacattattgtcagtacctaccatgaagaattcaatattattttacattgtcaaccattacatggatcccatgttgtgcatagcctctatgtcatcctttggtcttttatgtctgtagcgtgctagtagtattcaagttgtagcactgctgtgaaacagtacgttcaagtagtgtgcagcagtacgttcagttagtggactggggcagcctcgccttcagcaaaggttaggtacatgagccagttgctcactcttgctttctacgaatcccataggctactttgccccctaaccgtgacgaccccctgtgtttgagaagtttgagtctttttacgttaccgtgaccaagcgagcagagtagaaactcttgaagttgtgtatgtaagaatacaaattgagaacacaaggttacctacctttatagttggtaaacagcaagcaataccagagattttcatcgcaacgtgactctatcattcactatattaagttgcacacggatgttgtacaacactacacgtaaaagagagaaaaatactaatgtcgatcgctcaggt

SEQ ID NO: 260 - DNA, 744 bp, synthetic construct
  source 1..744: mol_type = other DNA
atgccgcaattttcagtagacctctgcctctttgacttggatggcacgatcgtgtcgaccaccaccgccgctgagagcgcgtggaaaaagctgtgcagacagcatggtgtcgacccagtcgagctgttcaagcattcacacggcgcccgcagccaggagatgatgaaaaagttctttccaaagctcgacaataccgataacaagggtgtgcttgccctcgaaaaagatatcgcacactcttacttggatacagtcagtctcattcccggtgctgagaatcttttgctgtccctagacgtggataccgagactcagaaaaagctccctgagcgaaagtgggccattgtcacaagcggatcgccttacctggcgttttcctggttcgaaacgatcttgaaaaacgtcggcaagcccaaggtattcatcaccggtttcgacgtgaaaaacggtaagccagatcctgagggctattcgcgggctcgtgaccttctgaggcaagacctccagctcacgggcaagcaagatctgaaatacgtcgttttcgaagatgctccggtcggcattaaggccggcaaggcaatgggcgcgatcactgtcgggatcacgagctcttacgacaagtccgttcttttcgacgccggagcagactacgttgtgtgtgacctcacacaagtctcggttgtgaaaaacaacgaaaacggaatcgtcatccaggtgaataaccccctcactcgcgactaataa

SEQ ID NO: 261 - DNA, 3883 bp, synthetic construct
  source 1..3883: mol_type = other DNA
agatgtagccggcgctgtagagttttggacggataggttgggtttcagtcgagacttcgttgaagatgactttgcaggcgtcgtgcgtgatgatgtgaccctgtttatctcggccgttcaagatcaagttgtccctgacaatacacttgcatgggtctgggtacgcggattagatgaattgtacgcggaatggtctgaagttgtatccactaactttcgtgacgcttcaggtcctgctatgactgagattggtgaacaaccctgggggcgtgagttcgcactccgagatccagctggaaattgtgttcatttcgtagctgaggaacaggattaatggtgttcaccactgttgcttcccctttgttggagcgtccgtcgttctgatggcgctctgagcccaaaatatcccttcttcgcccgagagcaagcctcggagtgtgcttgcaatctacttttcctactaaagttatcttcttgtggcttctgaatttgaatagaacgtgttcagacttgttagctaaatttgttgatgcgagatacttgacagaatcccgttgatgaactcatctgtgtgaccaccgcctggtgatggaatctcgcgcggaagccgtggtgttactgactctcaagcaattcagtagataaatttgtataacatcattgcaaggggtgctagcaatcaattgtccaataccaaacggcggcaagtgcaaaggggcgatagagagtttctgcgaggaagggaaggaatccgtatgcctgaaaacttttgtacaagtgtctttgtaagggcgaggtctgctctgacatctctctgagatctgagatctgatacctgcaggataacttcgtataatgtatgctatacgaagttatgtcacagtatcggcatctctgtctcgacgacagtgagtatagtcaactatgctatctagtagccaaagtaagtctacattccgggctttgcaggggttagctatttcattagacaatacttacaaccttcgaagggcttccccagaattcaattctatattgattcaatatccacccatcggacccgctctccgtaccccctgttcgcttcgccactacaaccatgtcaagacctgagaatcgtagcaaattgccccactacggcccgagtgctgtcggctggttaaagtagaatgacttgggtagccagatcgagacgcctgacattgatacgcagacagcgcagtcagtttcaaactgacaactgacgcgtactggattgacaggactccttggccggtgccattcgaatcgcttgtagacctcttgccagcatcttgccagagaagcttgaaggctggatcgctcagcctgagctcacacttagtagctccactagtcactcaggtgctcagcctctcctcagcgcctcaagctcaagcctcagggcctcagctgcatcgagctctggtgccagtgccagtgccagtgccagtgccagtgccagtgccagtgccagtgaagagagtggtatgagccaagctatacccaaaagcaaatgatggttattgccagcttccatgcacccctggggcgaaggacaacgaacaacagacagagtttgaattattcactggcctagtactaccaatttaaatttggtggttcagcgcaggaacggcgcgagtgagcgtaagggcaaactccgcatggggcgtgacgtcagtgtccctctggctgaggcactccagcaggctctggtcaacgcatcaacgtgtgtgtgtgtctaccaagcacattgtgcgctcgctgtccgtgcgccgaaatcgcaccagtcagaacgtctataaaacccctcttgcttggagggttaccgggccgtcttttcccaacgctccggctcactcactactctacacaacaaatgacgatcgagattgcgacgaaacagcaggtcgaggatctgatcgccaagtacgactacttcttgtttgattgcgacggcgttatctggttgggcgatcatctgctcccctccgtcccggagactctggcgttgctcaagaaacacaacaaacaaattatcttcgttacaaacaactcgacaaagtcccgaaacgattatctcactaaattcgaaaagcttggcattccgggaattactaaagatgaagtttttggcagcagctacgcaagcgcggtgtatgtcgataagattttgaaactgcctaaagacaagaaagtttgggtcttgggcgaaaagggcatcgaaacagaattgaaagaattcggatacacaaccgttggcggtacggacccatcgctctccacaactggtgcatttgatgccaacgataagcgtcttgaaaatctcgacgatgatgtcggctgtgtggtggcaggcttgctttttgatattaactatctcaagctttcgttgactctccagtacctgctgaaaaagcttccttttgtggctacaaacatcgattctaccttcccctccaaaggcaagctgttgatcggagctggctctattatcgaaagcgttgcgtttgccagcggtcgccaaccagacgcaatctgtggaaagccgaatcaatctatgatggactcgattaaggcggctttccccggactggccgcgaatccttctcgcggcttgatggtgggcgaccgattgaataccgatatgaaattcggcaaggacggcggtcttgatacacttctcgttctgaccggaatcgagaaaaaatccgacggttctaccacttacgtcaccaacaaacttggtgatcttgctgagttgctgtaacacggatcaacaaaaatgtgcgccagctttgttgtgtgcccttttcctctagcggatcctatccacatttcgtgaatgaaccgattaagctctgacgagatttccttgttttctgtagatacctcttgtagaggtgtcaaagttatgttgtgatcgagagagttacctgcaaggtattatgcaagcggcttgatgaggacactcaactacgtgtgagtaggagtgcgttgctcagcagttgacgcgtgagccgcttgagcagcttgataaaggtcctaatcgtcttccagctgttggcagacgacaatgtgctgtagtagtaggataggcccgtaaaagtgtagaagcaataggttgagactgactgtaatgggtacttgcgttcaaagactgaaagtccaaaggattgctcaaaggcccctgaggtctgagcctctgagcgcgctcttcgtcaaaattcgccggggccatcggtcatcctctcgagggcagcatcttcctgcttgaagactgagtccgtctcaggcttgctggtcacattattgtcagtacctaccatgaagaattcaatattattttacattgtcaaccattacatggatcccatgttgtgcatagcctctatgtcatcctttggtcttttatgtctgtagcgtgctagtagtattcaagttgtagcactgctgtgaaacagtacgttcaagtagtgtgcagcagtacgttcagttagtggactggggcagcctcgccttcagcaaaggttaggtacatgagccagttgctcactcttgctttctacgaatcccataggctactttgccccctaaccgtgacgaccccctgtgtttgagaagtttgagtctttttacgttaccgtgaccaagcgagcagagtagaaactcttgaagttgtgtatgtaagaatacaaattgagaacacaaggttacctacctttatagttggtaaacagcaagcaataccagagattttcatcgcaacgtgactctatcattcactatattaagttgcacacggatgttgtacaacactacacgtaaaagagagaaaaatactaatgtcgatcgctcaggt

SEQ ID NO: 262 - DNA, 891 bp, synthetic construct
  source 1..891: mol_type = other DNA
atgacgatcgagattgcgacgaaacagcaggtcgaggatctgatcgccaagtacgactacttcttgtttgattgcgacggcgttatctggttgggcgatcatctgctcccctccgtcccggagactctggcgttgctcaagaaacacaacaaacaaattatcttcgttacaaacaactcgacaaagtcccgaaacgattatctcactaaattcgaaaagcttggcattccgggaattactaaagatgaagtttttggcagcagctacgcaagcgcggtgtatgtcgataagattttgaaactgcctaaagacaagaaagtttgggtcttgggcgaaaagggcatcgaaacagaattgaaagaattcggatacacaaccgttggcggtacggacccatcgctctccacaactggtgcatttgatgccaacgataagcgtcttgaaaatctcgacgatgatgtcggctgtgtggtggcaggcttgctttttgatattaactatctcaagctttcgttgactctccagtacctgctgaaaaagcttccttttgtggctacaaacatcgattctaccttcccctccaaaggcaagctgttgatcggagctggctctattatcgaaagcgttgcgtttgccagcggtcgccaaccagacgcaatctgtggaaagccgaatcaatctatgatggactcgattaaggcggctttccccggactggccgcgaatccttctcgcggcttgatggtgggcgaccgattgaataccgatatgaaattcggcaaggacggcggtcttgatacacttctcgttctgaccggaatcgagaaaaaatccgacggttctaccacttacgtcaccaacaaacttggtgatcttgctgagttgctgtaa

SEQ ID NO: 263 - DNA, 3559 bp, synthetic construct
  source 1..3559: mol_type = other DNA
agatgtagccggcgctgtagagttttggacggataggttgggtttcagtcgagacttcgttgaagatgactttgcaggcgtcgtgcgtgatgatgtgaccctgtttatctcggccgttcaagatcaagttgtccctgacaatacacttgcatgggtctgggtacgcggattagatgaattgtacgcggaatggtctgaagttgtatccactaactttcgtgacgcttcaggtcctgctatgactgagattggtgaacaaccctgggggcgtgagttcgcactccgagatccagctggaaattgtgttcatttcgtagctgaggaacaggattaatggtgttcaccactgttgcttcccctttgttggagcgtccgtcgttctgatggcgctctgagcccaaaatatcccttcttcgcccgagagcaagcctcggagtgtgcttgcaatctacttttcctactaaagttatcttcttgtggcttctgaatttgaatagaacgtgttcagacttgttagctaaatttgttgatgcgagatacttgacagaatcccgttgatgaactcatctgtgtgaccaccgcctggtgatggaatctcgcgcggaagccgtggtgttactgactctcaagcaattcagtagataaatttgtataacatcattgcaaggggtgctagcaatcaattgtccaataccaaacggcggcaagtgcaaaggggcgatagagagtttctgcgaggaagggaaggaatccgtatgcctgaaaacttttgtacaagtgtctttgtaagggcgaggtctgctctgacatctctctgagatctgagatctgatacctgcaggataacttcgtataatgtatgctatacgaagttatgtcacagtatcggcatctctgtctcgacgacagtgagtatagtcaactatgctatctagtagccaaagtaagtctacattccgggctttgcaggggttagctatttcattagacaatacttacaaccttcgaagggcttccccagaattcaattctatattgattcaatatccacccatcggacccgctctccgtaccccctgttcgcttcgccactacaaccatgtcaagacctgagaatcgtagcaaattgccccactacggcccgagtgctgtcggctggttaaagtagaatgacttgggtagccagatcgagacgcctgacattgatacgcagacagcgcagtcagtttcaaactgacaactgacgcgtactggattgacaggactccttggccggtgccattcgaatcgcttgtagacctcttgccagcatcttgccagagaagcttgaaggctggatcgctcagcctgagctcacacttagtagctccactagtcactcaggtgctcagcctctcctcagcgcctcaagctcaagcctcagggcctcagctgcatcgagctctggtgccagtgccagtgccagtgccagtgccagtgccagtgccagtgccagtgaagagagtggtatgagccaagctatacccaaaagcaaatgatggttattgccagcttccatgcacccctggggcgaaggacaacgaacaacagacagagtttgaattattcactggcctagtactaccaatttaaatttggtggttcagcgcaggaacggcgcgagtgagcgtaagggcaaactccgcatggggcgtgacgtcagtgtccctctggctgaggcactccagcaggctctggtcaacgcatcaacgtgtgtgtgtgtctaccaagcacattgtgcgctcgctgtccgtgcgccgaaatcgcaccagtcagaacgtctataaaacccctcttgcttggagggttaccgggccgtcttttcccaacgctccggctcactcactactctacacaacaaatgaagaagcccattatcgccgtggatatggacgacacaatttgccatctcgtccgacgtgccatttatcataacaatatcaattttccaacacacccccttcgatatgaggatatgacgcattgggatacgtcccatctgcgccaccctgaatccacgcatgatgttttttacggacgacccggcttgtttgaggagctggaattgtacgacgagtacgtcgtggacgagatgcagaaacttaatgaagcctacgacgttatcattgtcaccgccgccgaccctaaaactgttgtcgagaagtggaactggctccagcgccacatgccgtttattaccgccgagcagtttattacgtgcaaacgaaagaatctcatcaacttcgatttgctgatcgatgatggtgcccataatctcatcccagcatggaaagctggtaaaaaagttatctgcatcccgcacccgtggaacggttccgaacgcgaacagtaccctttcccgctcatgtcgagctggaagggcgctaaggcatacatcgatgacctgttcgaaactgcctccggataacacggatcaacaaaaatgtgcgccagctttgttgtgtgcccttttcctctagcggatcctatccacatttcgtgaatgaaccgattaagctctgacgagatttccttgttttctgtagatacctcttgtagaggtgtcaaagttatgttgtgatcgagagagttacctgcaaggtattatgcaagcggcttgatgaggacactcaactacgtgtgagtaggagtgcgttgctcagcagttgacgcgtgagccgcttgagcagcttgataaaggtcctaatcgtcttccagctgttggcagacgacaatgtgctgtagtagtaggataggcccgtaaaagtgtagaagcaataggttgagactgactgtaatgggtacttgcgttcaaagactgaaagtccaaaggattgctcaaaggcccctgaggtctgagcctctgagcgcgctcttcgtcaaaattcgccggggccatcggtcatcctctcgagggcagcatcttcctgcttgaagactgagtccgtctcaggcttgctggtcacattattgtcagtacctaccatgaagaattcaatattattttacattgtcaaccattacatggatcccatgttgtgcatagcctctatgtcatcctttggtcttttatgtctgtagcgtgctagtagtattcaagttgtagcactgctgtgaaacagtacgttcaagtagtgtgcagcagtacgttcagttagtggactggggcagcctcgccttcagcaaaggttaggtacatgagccagttgctcactcttgctttctacgaatcccataggctactttgccccctaaccgtgacgaccccctgtgtttgagaagtttgagtctttttacgttaccgtgaccaagcgagcagagtagaaactcttgaagttgtgtatgtaagaatacaaattgagaacacaaggttacctacctttatagttggtaaacagcaagcaataccagagattttcatcgcaacgtgactctatcattcactatattaagttgcacacggatgttgtacaacactacacgtaaaagagagaaaaatactaatgtcgatcgctcaggt

SEQ ID NO: 264 - DNA, 567 bp, synthetic construct
  source 1..567: mol_type = other DNA
atgaagaagcccattatcgccgtggatatggacgacacaatttgccatctcgtccgacgtgccatttatcataacaatatcaattttccaacacacccccttcgatatgaggatatgacgcattgggatacgtcccatctgcgccaccctgaatccacgcatgatgttttttacggacgacccggcttgtttgaggagctggaattgtacgacgagtacgtcgtggacgagatgcagaaacttaatgaagcctacgacgttatcattgtcaccgccgccgaccctaaaactgttgtcgagaagtggaactggctccagcgccacatgccgtttattaccgccgagcagtttattacgtgcaaacgaaagaatctcatcaacttcgatttgctgatcgatgatggtgcccataatctcatcccagcatggaaagctggtaaaaaagttatctgcatcccgcacccgtggaacggttccgaacgcgaacagtaccctttcccgctcatgtcgagctggaagggcgctaaggcatacatcgatgacctgttcgaaactgcctccggataa

SEQ ID NO: 265 - DNA, 3637 bp, synthetic construct
  source 1..3637: mol_type = other DNA
agatgtagccggcgctgtagagttttggacggataggttgggtttcagtcgagacttcgttgaagatgactttgcaggcgtcgtgcgtgatgatgtgaccctgtttatctcggccgttcaagatcaagttgtccctgacaatacacttgcatgggtctgggtacgcggattagatgaattgtacgcggaatggtctgaagttgtatccactaactttcgtgacgcttcaggtcctgctatgactgagattggtgaacaaccctgggggcgtgagttcgcactccgagatccagctggaaattgtgttcatttcgtagctgaggaacaggattaatggtgttcaccactgttgcttcccctttgttggagcgtccgtcgttctgatggcgctctgagcccaaaatatcccttcttcgcccgagagcaagcctcggagtgtgcttgcaatctacttttcctactaaagttatcttcttgtggcttctgaatttgaatagaacgtgttcagacttgttagctaaatttgttgatgcgagatacttgacagaatcccgttgatgaactcatctgtgtgaccaccgcctggtgatggaatctcgcgcggaagccgtggtgttactgactctcaagcaattcagtagataaatttgtataacatcattgcaaggggtgctagcaatcaattgtccaataccaaacggcggcaagtgcaaaggggcgatagagagtttctgcgaggaagggaaggaatccgtatgcctgaaaacttttgtacaagtgtctttgtaagggcgaggtctgctctgacatctctctgagatctgagatctgatacctgcaggataacttcgtataatgtatgctatacgaagttatgtcacagtatcggcatctctgtctcgacgacagtgagtatagtcaactatgctatctagtagccaaagtaagtctacattccgggctttgcaggggttagctatttcattagacaatacttacaaccttcgaagggcttccccagaattcaattctatattgattcaatatccacccatcggacccgctctccgtaccccctgttcgcttcgccactacaaccatgtcaagacctgagaatcgtagcaaattgccccactacggcccgagtgctgtcggctggttaaagtagaatgacttgggtagccagatcgagacgcctgacattgatacgcagacagcgcagtcagtttcaaactgacaactgacgcgtactggattgacaggactccttggccggtgccattcgaatcgcttgtagacctcttgccagcatcttgccagagaagcttgaaggctggatcgctcagcctgagctcacacttagtagctccactagtcactcaggtgctcagcctctcctcagcgcctcaagctcaagcctcagggcctcagctgcatcgagctctggtgccagtgccagtgccagtgccagtgccagtgccagtgccagtgccagtgaagagagtggtatgagccaagctatacccaaaagcaaatgatggttattgccagcttccatgcacccctggggcgaaggacaacgaacaacagacagagtttgaattattcactggcctagtactaccaatttaaatttggtggttcagcgcaggaacggcgcgagtgagcgtaagggcaaactccgcatggggcgtgacgtcagtgtccctctggctgaggcactccagcaggctctggtcaacgcatcaacgtgtgtgtgtgtctaccaagcacattgtgcgctcgctgtccgtgcgccgaaatcgcaccagtcagaacgtctataaaacccctcttgcttggagggttaccgggccgtcttttcccaacgctccggctcactcactactctacacaacaaatggcaatgattttcaacgcaaaaggattcctttttgacatggacggcactctggttgacagcactgccgtcgtggagtccgtttggcgagacttttgtgcagagtacggactggatactcaggcagttatcgcatacgcacatggacgccagacaattgacacactcacgcacttcatcggtgcgggcgagaagactaacaaaattgccgcttcccttgaagaggttgaaatcaacaccacggaaggagtcacggaagttaagggagctgcggcgttgcttagcaagcttccacccgattcttgggcgttggttacttctgcgggccgaatgctggcagagaatcgaatgaaagcagctaatctgccacttcctatcgttatggtgtgtgccgaggatgttatgacgggcaagccttccccagagggatatattaaggctgcattggcactgggactggaaccaggtgagtgcgtggtgttcgaagacgcctctgctggtattaaggctggattggcttctggcgcgagcgttattgccgtccagcccgatgcactgggatcgtccgaagcccatgcagtctccgagctttccgacattatggtgaaaatttctggtgaacgctttaacatcatctgcggttaacacggatcaacaaaaatgtgcgccagctttgttgtgtgcccttttcctctagcggatcctatccacatttcgtgaatgaaccgattaagctctgacgagatttccttgttttctgtagatacctcttgtagaggtgtcaaagttatgttgtgatcgagagagttacctgcaaggtattatgcaagcggcttgatgaggacactcaactacgtgtgagtaggagtgcgttgctcagcagttgacgcgtgagccgcttgagcagcttgataaaggtcctaatcgtcttccagctgttggcagacgacaatgtgctgtagtagtaggataggcccgtaaaagtgtagaagcaataggttgagactgactgtaatgggtacttgcgttcaaagactgaaagtccaaaggattgctcaaaggcccctgaggtctgagcctctgagcgcgctcttcgtcaaaattcgccggggccatcggtcatcctctcgagggcagcatcttcctgcttgaagactgagtccgtctcaggcttgctggtcacattattgtcagtacctaccatgaagaattcaatattattttacattgtcaaccattacatggatcccatgttgtgcatagcctctatgtcatcctttggtcttttatgtctgtagcgtgctagtagtattcaagttgtagcactgctgtgaaacagtacgttcaagtagtgtgcagcagtacgttcagttagtggactggggcagcctcgccttcagcaaaggttaggtacatgagccagttgctcactcttgctttctacgaatcccataggctactttgccccctaaccgtgacgaccccctgtgtttgagaagtttgagtctttttacgttaccgtgaccaagcgagcagagtagaaactcttgaagttgtgtatgtaagaatacaaattgagaacacaaggttacctacctttatagttggtaaacagcaagcaataccagagattttcatcgcaacgtgactctatcattcactatattaagttgcacacggatgttgtacaacactacacgtaaaagagagaaaaatactaatgtcgatcgctcaggt

SEQ ID NO: 266 - DNA, 645 bp, synthetic construct
  source 1..645: mol_type = other DNA
atggcaatgattttcaacgcaaaaggattcctttttgacatggacggcactctggttgacagcactgccgtcgtggagtccgtttggcgagacttttgtgcagagtacggactggatactcaggcagttatcgcatacgcacatggacgccagacaattgacacactcacgcacttcatcggtgcgggcgagaagactaacaaaattgccgcttcccttgaagaggttgaaatcaacaccacggaaggagtcacggaagttaagggagctgcggcgttgcttagcaagcttccacccgattcttgggcgttggttacttctgcgggccgaatgctggcagagaatcgaatgaaagcagctaatctgccacttcctatcgttatggtgtgtgccgaggatgttatgacgggcaagccttccccagagggatatattaaggctgcattggcactgggactggaaccaggtgagtgcgtggtgttcgaagacgcctctgctggtattaaggctggattggcttctggcgcgagcgttattgccgtccagcccgatgcactgggatcgtccgaagcccatgcagtctccgagctttccgacattatggtgaaaatttctggtgaacgctttaacatcatctgcggttaa

SEQ ID NO: 267 - DNA, 3652 bp, synthetic construct
  source 1..3652: mol_type = other DNA
agatgtagccggcgctgtagagttttggacggataggttgggtttcagtcgagacttcgttgaagatgactttgcaggcgtcgtgcgtgatgatgtgaccctgtttatctcggccgttcaagatcaagttgtccctgacaatacacttgcatgggtctgggtacgcggattagatgaattgtacgcggaatggtctgaagttgtatccactaactttcgtgacgcttcaggtcctgctatgactgagattggtgaacaaccctgggggcgtgagttcgcactccgagatccagctggaaattgtgttcatttcgtagctgaggaacaggattaatggtgttcaccactgttgcttcccctttgttggagcgtccgtcgttctgatggcgctctgagcccaaaatatcccttcttcgcccgagagcaagcctcggagtgtgcttgcaatctacttttcctactaaagttatcttcttgtggcttctgaatttgaatagaacgtgttcagacttgttagctaaatttgttgatgcgagatacttgacagaatcccgttgatgaactcatctgtgtgaccaccgcctggtgatggaatctcgcgcggaagccgtggtgttactgactctcaagcaattcagtagataaatttgtataacatcattgcaaggggtgctagcaatcaattgtccaataccaaacggcggcaagtgcaaaggggcgatagagagtttctgcgaggaagggaaggaatccgtatgcctgaaaacttttgtacaagtgtctttgtaagggcgaggtctgctctgacatctctctgagatctgagatctgatacctgcaggataacttcgtataatgtatgctatacgaagttatgtcacagtatcggcatctctgtctcgacgacagtgagtatagtcaactatgctatctagtagccaaagtaagtctacattccgggctttgcaggggttagctatttcattagacaatacttacaaccttcgaagggcttccccagaattcaattctatattgattcaatatccacccatcggacccgctctccgtaccccctgttcgcttcgccactacaaccatgtcaagacctgagaatcgtagcaaattgccccactacggcccgagtgctgtcggctggttaaagtagaatgacttgggtagccagatcgagacgcctgacattgatacgcagacagcgcagtcagtttcaaactgacaactgacgcgtactggattgacaggactccttggccggtgccattcgaatcgcttgtagacctcttgccagcatcttgccagagaagcttgaaggctggatcgctcagcctgagctcacacttagtagctccactagtcactcaggtgctcagcctctcctcagcgcctcaagctcaagcctcagggcctcagctgcatcgagctctggtgccagtgccagtgccagtgccagtgccagtgccagtgccagtgccagtgaagagagtggtatgagccaagctatacccaaaagcaaatgatggttattgccagcttccatgcacccctggggcgaaggacaacgaacaacagacagagtttgaattattcactggcctagtactaccaatttaaatttggtggttcagcgcaggaacggcgcgagtgagcgtaagggcaaactccgcatggggcgtgacgtcagtgtccctctggctgaggcactccagcaggctctggtcaacgcatcaacgtgtgtgtgtgtctaccaagcacattgtgcgctcgctgtccgtgcgccgaaatcgcaccagtcagaacgtctataaaacccctcttgcttggagggttaccgggccgtcttttcccaacgctccggctcactcactactctacacaacaaatgacctcccacaaaacattcccgatcgcaggtattcttttcgactcggacggtgttttggtggactcgcacgaagcagcggctacagcatggaatcattgggcccgcacgtgggctccaggtttcgactttcatcgtgacgctcaacatggtcgtcgcctctctgatgttgtcgctgagttggttggcgatggcgattctgcactggcgacaaaagtgttgacagaattggagattgaaatggctacagaagtccccgctatggccggtgctgtggacctcctctcctcttccccagcggaccgttgggcggtcgtcacctccggtgcccgtgaaatggcggcagctcgtctcttgtctgctggcctgccaacgccccgcgtccttgtttccgctgacgatgtcactgctggtaaacccgcgccagagccatatcttaccggtgcacatctcttgggattggaaccccgcgtctgtgcggtcttcgaagatgcacacctgggcattttggcggcacgcgcggcgaacgtcggtttcgttgtcggtgtgggagcgcaaacaatcggtgaagatgtcgacgtttctgttgcggacctgtccggtattacttttgatggttcccacttggtcatcgaagccgatgcggtgctgacccgataacacggatcaacaaaaatgtgcgccagctttgttgtgtgcccttttcctctagcggatcctatccacatttcgtgaatgaaccgattaagctctgacgagatttccttgttttctgtagatacctcttgtagaggtgtcaaagttatgttgtgatcgagagagttacctgcaaggtattatgcaagcggcttgatgaggacactcaactacgtgtgagtaggagtgcgttgctcagcagttgacgcgtgagccgcttgagcagcttgataaaggtcctaatcgtcttccagctgttggcagacgacaatgtgctgtagtagtaggataggcccgtaaaagtgtagaagcaataggttgagactgactgtaatgggtacttgcgttcaaagactgaaagtccaaaggattgctcaaaggcccctgaggtctgagcctctgagcgcgctcttcgtcaaaattcgccggggccatcggtcatcctctcgagggcagcatcttcctgcttgaagactgagtccgtctcaggcttgctggtcacattattgtcagtacctaccatgaagaattcaatattattttacattgtcaaccattacatggatcccatgttgtgcatagcctctatgtcatcctttggtcttttatgtctgtagcgtgctagtagtattcaagttgtagcactgctgtgaaacagtacgttcaagtagtgtgcagcagtacgttcagttagtggactggggcagcctcgccttcagcaaaggttaggtacatgagccagttgctcactcttgctttctacgaatcccataggctactttgccccctaaccgtgacgaccccctgtgtttgagaagtttgagtctttttacgttaccgtgaccaagcgagcagagtagaaactcttgaagttgtgtatgtaagaatacaaattgagaacacaaggttacctacctttatagttggtaaacagcaagcaataccagagattttcatcgcaacgtgactctatcattcactatattaagttgcacacggatgttgtacaacactacacgtaaaagagagaaaaatactaatgtcgatcgctcaggt

SEQ ID NO: 268 - DNA, 660 bp, synthetic construct
  source 1..660: mol_type = other DNA
atgacctcccacaaaacattcccgatcgcaggtattcttttcgactcggacggtgttttggtggactcgcacgaagcagcggctacagcatggaatcattgggcccgcacgtgggctccaggtttcgactttcatcgtgacgctcaacatggtcgtcgcctctctgatgttgtcgctgagttggttggcgatggcgattctgcactggcgacaaaagtgttgacagaattggagattgaaatggctacagaagtccccgctatggccggtgctgtggacctcctctcctcttccccagcggaccgttgggcggtcgtcacctccggtgcccgtgaaatggcggcagctcgtctcttgtctgctggcctgccaacgccccgcgtccttgtttccgctgacgatgtcactgctggtaaacccgcgccagagccatatcttaccggtgcacatctcttgggattggaaccccgcgtctgtgcggtcttcgaagatgcacacctgggcattttggcggcacgcgcggcgaacgtcggtttcgttgtcggtgtgggagcgcaaacaatcggtgaagatgtcgacgtttctgttgcggacctgtccggtattacttttgatggttcccacttggtcatcgaagccgatgcggtgctgacccgataa

SEQ ID NO: 269 - DNA, 3679 bp, synthetic construct
  source 1..3679: mol_type = other DNA
agatgtagccggcgctgtagagttttggacggataggttgggtttcagtcgagacttcgttgaagatgactttgcaggcgtcgtgcgtgatgatgtgaccctgtttatctcggccgttcaagatcaagttgtccctgacaatacacttgcatgggtctgggtacgcggattagatgaattgtacgcggaatggtctgaagttgtatccactaactttcgtgacgcttcaggtcctgctatgactgagattggtgaacaaccctgggggcgtgagttcgcactccgagatccagctggaaattgtgttcatttcgtagctgaggaacaggattaatggtgttcaccactgttgcttcccctttgttggagcgtccgtcgttctgatggcgctctgagcccaaaatatcccttcttcgcccgagagcaagcctcggagtgtgcttgcaatctacttttcctactaaagttatcttcttgtggcttctgaatttgaatagaacgtgttcagacttgttagctaaatttgttgatgcgagatacttgacagaatcccgttgatgaactcatctgtgtgaccaccgcctggtgatggaatctcgcgcggaagccgtggtgttactgactctcaagcaattcagtagataaatttgtataacatcattgcaaggggtgctagcaatcaattgtccaataccaaacggcggcaagtgcaaaggggcgatagagagtttctgcgaggaagggaaggaatccgtatgcctgaaaacttttgtacaagtgtctttgtaagggcgaggtctgctctgacatctctctgagatctgagatctgatacctgcaggataacttcgtataatgtatgctatacgaagttatgtcacagtatcggcatctctgtctcgacgacagtgagtatagtcaactatgctatctagtagccaaagtaagtctacattccgggctttgcaggggttagctatttcattagacaatacttacaaccttcgaagggcttccccagaattcaattctatattgattcaatatccacccatcggacccgctctccgtaccccctgttcgcttcgccactacaaccatgtcaagacctgagaatcgtagcaaattgccccactacggcccgagtgctgtcggctggttaaagtagaatgacttgggtagccagatcgagacgcctgacattgatacgcagacagcgcagtcagtttcaaactgacaactgacgcgtactggattgacaggactccttggccggtgccattcgaatcgcttgtagacctcttgccagcatcttgccagagaagcttgaaggctggatcgctcagcctgagctcacacttagtagctccactagtcactcaggtgctcagcctctcctcagcgcctcaagctcaagcctcagggcctcagctgcatcgagctctggtgccagtgccagtgccagtgccagtgccagtgccagtgccagtgccagtgaagagagtggtatgagccaagctatacccaaaagcaaatgatggttattgccagcttccatgcacccctggggcgaaggacaacgaacaacagacagagtttgaattattcactggcctagtactaccaatttaaatttggtggttcagcgcaggaacggcgcgagtgagcgtaagggcaaactccgcatggggcgtgacgtcagtgtccctctggctgaggcactccagcaggctctggtcaacgcatcaacgtgtgtgtgtgtctaccaagcacattgtgcgctcgctgtccgtgcgccgaaatcgcaccagtcagaacgtctataaaacccctcttgcttggagggttaccgggccgtcttttcccaacgctccggctcactcactactctacacaacaaatggaaaacaaaattcgcgctgagcttcgagtgcgagcacttctcctggatcttgatggcacgcttgtcgattctcatgccgtcacccgacgttcgtggcaacgctgggcggaagcagtcggagtccctttggaaagcttcttccaccgaacacacggacgacctggacatgaagttatggccgaggtcttgccgcgccgttccgcagcggaaaatttggcagactcgcaggctcttctgggctatgaactcaacgacacggacggtgtccgtgctctcccaggcgctgctcgtctgcttgcatctcttgacgacatgccttgggctatcgttaccgcgagcacaaagcctttggcacgtgcgaagttggctgctgctcgactccctgttccagatgtcttggttacggctgaacaagtggatgcgggcaagcctgaccctgcaggctatctcctggcagcgcgacgtctcggcgttgacccaatgtggtgcgctgttgttgaagatgcttctgcaggagtccgtgccgccatcgccgccggaatgcccgtgttgggcgtcggcggccccgtggacccaatgccgacatgggatttggcaggtctggatgatctcgaggcactgcctgatggtgtgctcattcgccttgtcggcagcctcgcaccggcgaacggcgcaccagtttaacacggatcaacaaaaatgtgcgccagctttgttgtgtgcccttttcctctagcggatcctatccacatttcgtgaatgaaccgattaagctctgacgagatttccttgttttctgtagatacctcttgtagaggtgtcaaagttatgttgtgatcgagagagttacctgcaaggtattatgcaagcggcttgatgaggacactcaactacgtgtgagtaggagtgcgttgctcagcagttgacgcgtgagccgcttgagcagcttgataaaggtcctaatcgtcttccagctgttggcagacgacaatgtgctgtagtagtaggataggcccgtaaaagtgtagaagcaataggttgagactgactgtaatgggtacttgcgttcaaagactgaaagtccaaaggattgctcaaaggcccctgaggtctgagcctctgagcgcgctcttcgtcaaaattcgccggggccatcggtcatcctctcgagggcagcatcttcctgcttgaagactgagtccgtctcaggcttgctggtcacattattgtcagtacctaccatgaagaattcaatattattttacattgtcaaccattacatggatcccatgttgtgcatagcctctatgtcatcctttggtcttttatgtctgtagcgtgctagtagtattcaagttgtagcactgctgtgaaacagtacgttcaagtagtgtgcagcagtacgttcagttagtggactggggcagcctcgccttcagcaaaggttaggtacatgagccagttgctcactcttgctttctacgaatcccataggctactttgccccctaaccgtgacgaccccctgtgtttgagaagtttgagtctttttacgttaccgtgaccaagcgagcagagtagaaactcttgaagttgtgtatgtaagaatacaaattgagaacacaaggttacctacctttatagttggtaaacagcaagcaataccagagattttcatcgcaacgtgactctatcattcactatattaagttgcacacggatgttgtacaacactacacgtaaaagagagaaaaatactaatgtcgatcgctcaggt

SEQ ID NO: 270 - DNA, 687 bp, synthetic construct
  source 1..687: mol_type = other DNA
atggaaaacaaaattcgcgctgagcttcgagtgcgagcacttctcctggatcttgatggcacgcttgtcgattctcatgccgtcacccgacgttcgtggcaacgctgggcggaagcagtcggagtccctttggaaagcttcttccaccgaacacacggacgacctggacatgaagttatggccgaggtcttgccgcgccgttccgcagcggaaaatttggcagactcgcaggctcttctgggctatgaactcaacgacacggacggtgtccgtgctctcccaggcgctgctcgtctgcttgcatctcttgacgacatgccttgggctatcgttaccgcgagcacaaagcctttggcacgtgcgaagttggctgctgctcgactccctgttccagatgtcttggttacggctgaacaagtggatgcgggcaagcctgaccctgcaggctatctcctggcagcgcgacgtctcggcgttgacccaatgtggtgcgctgttgttgaagatgcttctgcaggagtccgtgccgccatcgccgccggaatgcccgtgttgggcgtcggcggccccgtggacccaatgccgacatgggatttggcaggtctggatgatctcgaggcactgcctgatggtgtgctcattcgccttgtcggcagcctcgcaccggcgaacggcgcaccagtttaa

SEQ ID NO: 271 - DNA, 3643 bp, synthetic construct
  source 1..3643: mol_type = other DNA
agatgtagccggcgctgtagagttttggacggataggttgggtttcagtcgagacttcgttgaagatgactttgcaggcgtcgtgcgtgatgatgtgaccctgtttatctcggccgttcaagatcaagttgtccctgacaatacacttgcatgggtctgggtacgcggattagatgaattgtacgcggaatggtctgaagttgtatccactaactttcgtgacgcttcaggtcctgctatgactgagattggtgaacaaccctgggggcgtgagttcgcactccgagatccagctggaaattgtgttcatttcgtagctgaggaacaggattaatggtgttcaccactgttgcttcccctttgttggagcgtccgtcgttctgatggcgctctgagcccaaaatatcccttcttcgcccgagagcaagcctcggagtgtgcttgcaatctacttttcctactaaagttatcttcttgtggcttctgaatttgaatagaacgtgttcagacttgttagctaaatttgttgatgcgagatacttgacagaatcccgttgatgaactcatctgtgtgaccaccgcctggtgatggaatctcgcgcggaagccgtggtgttactgactctcaagcaattcagtagataaatttgtataacatcattgcaaggggtgctagcaatcaattgtccaataccaaacggcggcaagtgcaaaggggcgatagagagtttctgcgaggaagggaaggaatccgtatgcctgaaaacttttgtacaagtgtctttgtaagggcgaggtctgctctgacatctctctgagatctgagatctgatacctgcaggataacttcgtataatgtatgctatacgaagttatgtcacagtatcggcatctctgtctcgacgacagtgagtatagtcaactatgctatctagtagccaaagtaagtctacattccgggctttgcaggggttagctatttcattagacaatacttacaaccttcgaagggcttccccagaattcaattctatattgattcaatatccacccatcggacccgctctccgtaccccctgttcgcttcgccactacaaccatgtcaagacctgagaatcgtagcaaattgccccactacggcccgagtgctgtcggctggttaaagtagaatgacttgggtagccagatcgagacgcctgacattgatacgcagacagcgcagtcagtttcaaactgacaactgacgcgtactggattgacaggactccttggccggtgccattcgaatcgcttgtagacctcttgccagcatcttgccagagaagcttgaaggctggatcgctcagcctgagctcacacttagtagctccactagtcactcaggtgctcagcctctcctcagcgcctcaagctcaagcctcagggcctcagctgcatcgagctctggtgccagtgccagtgccagtgccagtgccagtgccagtgccagtgccagtgaagagagtggtatgagccaagctatacccaaaagcaaatgatggttattgccagcttccatgcacccctggggcgaaggacaacgaacaacagacagagtttgaattattcactggcctagtactaccaatttaaatttggtggttcagcgcaggaacggcgcgagtgagcgtaagggcaaactccgcatggggcgtgacgtcagtgtccctctggctgaggcactccagcaggctctggtcaacgcatcaacgtgtgtgtgtgtctaccaagcacattgtgcgctcgctgtccgtgcgccgaaatcgcaccagtcagaacgtctataaaacccctcttgcttggagggttaccgggccgtcttttcccaacgctccggctcactcactactctacacaacaaatgacccgtgaacgtgttcagtcggactttggcaaatatgttctgttcgatgttgacggaacgctcattgatgcaacggataaccaacgccgcgtttggaagacgtgggctggtcgctacggcctggacccagatgcggtccatgagctcgcgttgcgtacccgtcccatggaaactttcgccgaagtggctcctgaccgtgaccctcaagaatgtcttgccgttctccatgaattggaagacgaagacgtgcgcagcggcgtgtatggtgcgtttgatggcgcctcggaactcctttccgcattgccgcctggctgttggggtctggtgacctctaattacgaacaccgagttcgcggccgatttgctcgaactggcctgccggttccgggcgttgtcgtcgacgctgctgcagtggacgagggaaagccttcgcccgttccgtacttgctggcggcgggtcgattgggtgcagagccagaagattgtcttgtcgtggaagatgccccttcgggcgtggaatctggccgtcgagcgggaatgactgtgtggggcgtgaatacacctggcggagttgacggtgtgcatcgccatttcacatcgttgcgtgaagcggtccccgacattttggcttttgttgcaggcggataacacggatcaacaaaaatgtgcgccagctttgttgtgtgcccttttcctctagcggatcctatccacatttcgtgaatgaaccgattaagctctgacgagatttccttgttttctgtagatacctcttgtagaggtgtcaaagttatgttgtgatcgagagagttacctgcaaggtattatgcaagcggcttgatgaggacactcaactacgtgtgagtaggagtgcgttgctcagcagttgacgcgtgagccgcttgagcagcttgataaaggtcctaatcgtcttccagctgttggcagacgacaatgtgctgtagtagtaggataggcccgtaaaagtgtagaagcaataggttgagactgactgtaatgggtacttgcgttcaaagactgaaagtccaaaggattgctcaaaggcccctgaggtctgagcctctgagcgcgctcttcgtcaaaattcgccggggccatcggtcatcctctcgagggcagcatcttcctgcttgaagactgagtccgtctcaggcttgctggtcacattattgtcagtacctaccatgaagaattcaatattattttacattgtcaaccattacatggatcccatgttgtgcatagcctctatgtcatcctttggtcttttatgtctgtagcgtgctagtagtattcaagttgtagcactgctgtgaaacagtacgttcaagtagtgtgcagcagtacgttcagttagtggactggggcagcctcgccttcagcaaaggttaggtacatgagccagttgctcactcttgctttctacgaatcccataggctactttgccccctaaccgtgacgaccccctgtgtttgagaagtttgagtctttttacgttaccgtgaccaagcgagcagagtagaaactcttgaagttgtgtatgtaagaatacaaattgagaacacaaggttacctacctttatagttggtaaacagcaagcaataccagagattttcatcgcaacgtgactctatcattcactatattaagttgcacacggatgttgtacaacactacacgtaaaagagagaaaaatactaatgtcgatcgctcaggt

SEQ ID NO: 272 - DNA, 651 bp, synthetic construct
  source 1..651: mol_type = other DNA
atgacccgtgaacgtgttcagtcggactttggcaaatatgttctgttcgatgttgacggaacgctcattgatgcaacggataaccaacgccgcgtttggaagacgtgggctggtcgctacggcctggacccagatgcggtccatgagctcgcgttgcgtacccgtcccatggaaactttcgccgaagtggctcctgaccgtgaccctcaagaatgtcttgccgttctccatgaattggaagacgaagacgtgcgcagcggcgtgtatggtgcgtttgatggcgcctcggaactcctttccgcattgccgcctggctgttggggtctggtgacctctaattacgaacaccgagttcgcggccgatttgctcgaactggcctgccggttccgggcgttgtcgtcgacgctgctgcagtggacgagggaaagccttcgcccgttccgtacttgctggcggcgggtcgattgggtgcagagccagaagattgtcttgtcgtggaagatgccccttcgggcgtggaatctggccgtcgagcgggaatgactgtgtggggcgtgaatacacctggcggagttgacggtgtgcatcgccatttcacatcgttgcgtgaagcggtccccgacattttggcttttgttgcaggcggataa

SEQ ID NO: 273 - DNA, 3754 bp, synthetic construct
  source 1..3754: mol_type = other DNA
agatgtagccggcgctgtagagttttggacggataggttgggtttcagtcgagacttcgttgaagatgactttgcaggcgtcgtgcgtgatgatgtgaccctgtttatctcggccgttcaagatcaagttgtccctgacaatacacttgcatgggtctgggtacgcggattagatgaattgtacgcggaatggtctgaagttgtatccactaactttcgtgacgcttcaggtcctgctatgactgagattggtgaacaaccctgggggcgtgagttcgcactccgagatccagctggaaattgtgttcatttcgtagctgaggaacaggattaatggtgttcaccactgttgcttcccctttgttggagcgtccgtcgttctgatggcgctctgagcccaaaatatcccttcttcgcccgagagcaagcctcggagtgtgcttgcaatctacttttcctactaaagttatcttcttgtggcttctgaatttgaatagaacgtgttcagacttgttagctaaatttgttgatgcgagatacttgacagaatcccgttgatgaactcatctgtgtgaccaccgcctggtgatggaatctcgcgcggaagccgtggtgttactgactctcaagcaattcagtagataaatttgtataacatcattgcaaggggtgctagcaatcaattgtccaataccaaacggcggcaagtgcaaaggggcgatagagagtttctgcgaggaagggaaggaatccgtatgcctgaaaacttttgtacaagtgtctttgtaagggcgaggtctgctctgacatctctctgagatctgagatctgatacctgcaggataacttcgtataatgtatgctatacgaagttatgtcacagtatcggcatctctgtctcgacgacagtgagtatagtcaactatgctatctagtagccaaagtaagtctacattccgggctttgcaggggttagctatttcattagacaatacttacaaccttcgaagggcttccccagaattcaattctatattgattcaatatccacccatcggacccgctctccgtaccccctgttcgcttcgccactacaaccatgtcaagacctgagaatcgtagcaaattgccccactacggcccgagtgctgtcggctggttaaagtagaatgacttgggtagccagatcgagacgcctgacattgatacgcagacagcgcagtcagtttcaaactgacaactgacgcgtactggattgacaggactccttggccggtgccattcgaatcgcttgtagacctcttgccagcatcttgccagagaagcttgaaggctggatcgctcagcctgagctcacacttagtagctccactagtcactcaggtgctcagcctctcctcagcgcctcaagctcaagcctcagggcctcagctgcatcgagctctggtgccagtgccagtgccagtgccagtgccagtgccagtgccagtgccagtgaagagagtggtatgagccaagctatacccaaaagcaaatgatggttattgccagcttccatgcacccctggggcgaaggacaacgaacaacagacagagtttgaattattcactggcctagtactaccaatttaaatttggtggttcagcgcaggaacggcgcgagtgagcgtaagggcaaactccgcatggggcgtgacgtcagtgtccctctggctgaggcactccagcaggctctggtcaacgcatcaacgtgtgtgtgtgtctaccaagcacattgtgcgctcgctgtccgtgcgccgaaatcgcaccagtcagaacgtctataaaacccctcttgcttggagggttaccgggccgtcttttcccaacgctccggctcactcactactctacacaacaaatggtcactgagatcgaagtggacgcggtcctgttcgatatggacggtacgcttatcgactctactccggctgtgaaccaaacctgggccgagtacatcgagcgctataatttggactttgattatgtgatgtcgcactgtcatggatgtcgtacagtggaatccctgaaaaacattgttggcctgccggatgatcagttggagcagggcgttgtggagttcgagggccgtattagcgagctggcagaggaggcagcgcgaacaaatggtcccggccaaatcgtggctctcccaggagcgaaagagctgcttgcacaactgaataagggttcggaacagccaggtcgtcgcccgggatgggctatcgttacttctgcgacaaaagcgtatgcgtacgttggttttcgcgcctctggcgttaatggaacggaatttcctcgagcctttgtcacgggagataacgtgagcaagggaaaaccagaccctgagccgtatcttctcggagctaagacgctgcagccccctgctgatccaaagcgttgtcttgttattgaggacgctccaccaggcattcgttcgggtgtggccgcaggagctaaaacgctgggacttacaaccacgcatgcagagaacctgatgtggcaggcaggtgctaactgggtcgtcccagacctgtcttcggtttccgcccgatgggaaggtgagggtgcggacgcccgtctttttatccgtattgagaactcgggccaacgacccgaataacacggatcaacaaaaatgtgcgccagctttgttgtgtgcccttttcctctagcggatcctatccacatttcgtgaatgaaccgattaagctctgacgagatttccttgttttctgtagatacctcttgtagaggtgtcaaagttatgttgtgatcgagagagttacctgcaaggtattatgcaagcggcttgatgaggacactcaactacgtgtgagtaggagtgcgttgctcagcagttgacgcgtgagccgcttgagcagcttgataaaggtcctaatcgtcttccagctgttggcagacgacaatgtgctgtagtagtaggataggcccgtaaaagtgtagaagcaataggttgagactgactgtaatgggtacttgcgttcaaagactgaaagtccaaaggattgctcaaaggcccctgaggtctgagcctctgagcgcgctcttcgtcaaaattcgccggggccatcggtcatcctctcgagggcagcatcttcctgcttgaagactgagtccgtctcaggcttgctggtcacattattgtcagtacctaccatgaagaattcaatattattttacattgtcaaccattacatggatcccatgttgtgcatagcctctatgtcatcctttggtcttttatgtctgtagcgtgctagtagtattcaagttgtagcactgctgtgaaacagtacgttcaagtagtgtgcagcagtacgttcagttagtggactggggcagcctcgccttcagcaaaggttaggtacatgagccagttgctcactcttgctttctacgaatcccataggctactttgccccctaaccgtgacgaccccctgtgtttgagaagtttgagtctttttacgttaccgtgaccaagcgagcagagtagaaactcttgaagttgtgtatgtaagaatacaaattgagaacacaaggttacctacctttatagttggtaaacagcaagcaataccagagattttcatcgcaacgtgactctatcattcactatattaagttgcacacggatgttgtacaacactacacgtaaaagagagaaaaatactaatgtcgatcgctcaggt

SEQ ID NO: 274 - DNA, 762 bp, synthetic construct
  source 1..762: mol_type = other DNA
atggtcactgagatcgaagtggacgcggtcctgttcgatatggacggtacgcttatcgactctactccggctgtgaaccaaacctgggccgagtacatcgagcgctataatttggactttgattatgtgatgtcgcactgtcatggatgtcgtacagtggaatccctgaaaaacattgttggcctgccggatgatcagttggagcagggcgttgtggagttcgagggccgtattagcgagctggcagaggaggcagcgcgaacaaatggtcccggccaaatcgtggctctcccaggagcgaaagagctgcttgcacaactgaataagggttcggaacagccaggtcgtcgcccgggatgggctatcgttacttctgcgacaaaagcgtatgcgtacgttggttttcgcgcctctggcgttaatggaacggaatttcctcgagcctttgtcacgggagataacgtgagcaagggaaaaccagaccctgagccgtatcttctcggagctaagacgctgcagccccctgctgatccaaagcgttgtcttgttattgaggacgctccaccaggcattcgttcgggtgtggccgcaggagctaaaacgctgggacttacaaccacgcatgcagagaacctgatgtggcaggcaggtgctaactgggtcgtcccagacctgtcttcggtttccgcccgatgggaaggtgagggtgcggacgcccgtctttttatccgtattgagaactcgggccaacgacccgaataa

SEQ ID NO: 275 - DNA, 3790 bp, synthetic construct
  source 1..3790: mol_type = other DNA
agatgtagccggcgctgtagagttttggacggataggttgggtttcagtcgagacttcgttgaagatgactttgcaggcgtcgtgcgtgatgatgtgaccctgtttatctcggccgttcaagatcaagttgtccctgacaatacacttgcatgggtctgggtacgcggattagatgaattgtacgcggaatggtctgaagttgtatccactaactttcgtgacgcttcaggtcctgctatgactgagattggtgaacaaccctgggggcgtgagttcgcactccgagatccagctggaaattgtgttcatttcgtagctgaggaacaggattaatggtgttcaccactgttgcttcccctttgttggagcgtccgtcgttctgatggcgctctgagcccaaaatatcccttcttcgcccgagagcaagcctcggagtgtgcttgcaatctacttttcctactaaagttatcttcttgtggcttctgaatttgaatagaacgtgttcagacttgttagctaaatttgttgatgcgagatacttgacagaatcccgttgatgaactcatctgtgtgaccaccgcctggtgatggaatctcgcgcggaagccgtggtgttactgactctcaagcaattcagtagataaatttgtataacatcattgcaaggggtgctagcaatcaattgtccaataccaaacggcggcaagtgcaaaggggcgatagagagtttctgcgaggaagggaaggaatccgtatgcctgaaaacttttgtacaagtgtctttgtaagggcgaggtctgctctgacatctctctgagatctgagatctgatacctgcaggataacttcgtataatgtatgctatacgaagttatgtcacagtatcggcatctctgtctcgacgacagtgagtatagtcaactatgctatctagtagccaaagtaagtctacattccgggctttgcaggggttagctatttcattagacaatacttacaaccttcgaagggcttccccagaattcaattctatattgattcaatatccacccatcggacccgctctccgtaccccctgttcgcttcgccactacaaccatgtcaagacctgagaatcgtagcaaattgccccactacggcccgagtgctgtcggctggttaaagtagaatgacttgggtagccagatcgagacgcctgacattgatacgcagacagcgcagtcagtttcaaactgacaactgacgcgtactggattgacaggactccttggccggtgccattcgaatcgcttgtagacctcttgccagcatcttgccagagaagcttgaaggctggatcgctcagcctgagctcacacttagtagctccactagtcactcaggtgctcagcctctcctcagcgcctcaagctcaagcctcagggcctcagctgcatcgagctctggtgccagtgccagtgccagtgccagtgccagtgccagtgccagtgccagtgaagagagtggtatgagccaagctatacccaaaagcaaatgatggttattgccagcttccatgcacccctggggcgaaggacaacgaacaacagacagagtttgaattattcactggcctagtactaccaatttaaatttggtggttcagcgcaggaacggcgcgagtgagcgtaagggcaaactccgcatggggcgtgacgtcagtgtccctctggctgaggcactccagcaggctctggtcaacgcatcaacgtgtgtgtgtgtctaccaagcacattgtgcgctcgctgtccgtgcgccgaaatcgcaccagtcagaacgtctataaaacccctcttgcttggagggttaccgggccgtcttttcccaacgctccggctcactcactactctacacaacaaatggctaaactcgatgcttccggttttctcattgatttggacggcactatttttcgcggccaggagcttatcgatggcgccaccgaggctatccacacattgcagtcgctgggcaaatcggtggtgtttttgtcgaatcgaggtaatttgagccgcgcaatgtgtcgtaaaaaactcctgggcgctggcattcgcacagatgagcgatcgattgtgctctcttcttctgtcacagcgagcttccttaaaaagcattatccgctgtctaaggtgtgggtcctgggagagaagggtttgacggatgaacttgcactcgcgggcgttacaatggctcaaaaaccacaagcagcggattggctggtcatttcgttgcatgaaacagtgacttatgaagatttgaaccttgcgttcaaagccgcctcctccggtgcgcgaattatcgctacaaaccgcgaccgatccttccccaacgaaggcggccacgcaatggacgtggtgggcatgatcggcgctattgaagcttccgctggcgctaagactgaactcgtcgtgggcaagccaagctggctgatggctgaagccgcgtgcgaagctctgggccttccacccgtggagtgcgcgatcattggagactcgcttgagagcgacatcgctatgggtcgtttgtacggaatgaagtcggtgcttgtgatgacaggatctgctaagttgggagtgccacgcctttacgagcctgacattgtgttggattccatcaaagaccttacagaactggcgaaggagggtattctgctctaacacggatcaacaaaaatgtgcgccagctttgttgtgtgcccttttcctctagcggatcctatccacatttcgtgaatgaaccgattaagctctgacgagatttccttgttttctgtagatacctcttgtagaggtgtcaaagttatgttgtgatcgagagagttacctgcaaggtattatgcaagcggcttgatgaggacactcaactacgtgtgagtaggagtgcgttgctcagcagttgacgcgtgagccgcttgagcagcttgataaaggtcctaatcgtcttccagctgttggcagacgacaatgtgctgtagtagtaggataggcccgtaaaagtgtagaagcaataggttgagactgactgtaatgggtacttgcgttcaaagactgaaagtccaaaggattgctcaaaggcccctgaggtctgagcctctgagcgcgctcttcgtcaaaattcgccggggccatcggtcatcctctcgagggcagcatcttcctgcttgaagactgagtccgtctcaggcttgctggtcacattattgtcagtacctaccatgaagaattcaatattattttacattgtcaaccattacatggatcccatgttgtgcatagcctctatgtcatcctttggtcttttatgtctgtagcgtgctagtagtattcaagttgtagcactgctgtgaaacagtacgttcaagtagtgtgcagcagtacgttcagttagtggactggggcagcctcgccttcagcaaaggttaggtacatgagccagttgctcactcttgctttctacgaatcccataggctactttgccccctaaccgtgacgaccccctgtgtttgagaagtttgagtctttttacgttaccgtgaccaagcgagcagagtagaaactcttgaagttgtgtatgtaagaatacaaattgagaacacaaggttacctacctttatagttggtaaacagcaagcaataccagagattttcatcgcaacgtgactctatcattcactatattaagttgcacacggatgttgtacaacactacacgtaaaagagagaaaaatactaatgtcgatcgctcaggt

SEQ ID NO: 276 - DNA, 798 bp, synthetic construct
  source 1..798: mol_type = other DNA
atggctaaactcgatgcttccggttttctcattgatttggacggcactatttttcgcggccaggagcttatcgatggcgccaccgaggctatccacacattgcagtcgctgggcaaatcggtggtgtttttgtcgaatcgaggtaatttgagccgcgcaatgtgtcgtaaaaaactcctgggcgctggcattcgcacagatgagcgatcgattgtgctctcttcttctgtcacagcgagcttccttaaaaagcattatccgctgtctaaggtgtgggtcctgggagagaagggtttgacggatgaacttgcactcgcgggcgttacaatggctcaaaaaccacaagcagcggattggctggtcatttcgttgcatgaaacagtgacttatgaagatttgaaccttgcgttcaaagccgcctcctccggtgcgcgaattatcgctacaaaccgcgaccgatccttccccaacgaaggcggccacgcaatggacgtggtgggcatgatcggcgctattgaagcttccgctggcgctaagactgaactcgtcgtgggcaagccaagctggctgatggctgaagccgcgtgcgaagctctgggccttccacccgtggagtgcgcgatcattggagactcgcttgagagcgacatcgctatgggtcgtttgtacggaatgaagtcggtgcttgtgatgacaggatctgctaagttgggagtgccacgcctttacgagcctgacattgtgttggattccatcaaagaccttacagaactggcgaaggagggtattctgctctaa

SEQ ID NO: 277 - DNA, 3733 bp, synthetic construct
  source 1..3733: mol_type = other DNA
agatgtagccggcgctgtagagttttggacggataggttgggtttcagtcgagacttcgttgaagatgactttgcaggcgtcgtgcgtgatgatgtgaccctgtttatctcggccgttcaagatcaagttgtccctgacaatacacttgcatgggtctgggtacgcggattagatgaattgtacgcggaatggtctgaagttgtatccactaactttcgtgacgcttcaggtcctgctatgactgagattggtgaacaaccctgggggcgtgagttcgcactccgagatccagctggaaattgtgttcatttcgtagctgaggaacaggattaatggtgttcaccactgttgcttcccctttgttggagcgtccgtcgttctgatggcgctctgagcccaaaatatcccttcttcgcccgagagcaagcctcggagtgtgcttgcaatctacttttcctactaaagttatcttcttgtggcttctgaatttgaatagaacgtgttcagacttgttagctaaatttgttgatgcgagatacttgacagaatcccgttgatgaactcatctgtgtgaccaccgcctggtgatggaatctcgcgcggaagccgtggtgttactgactctcaagcaattcagtagataaatttgtataacatcattgcaaggggtgctagcaatcaattgtccaataccaaacggcggcaagtgcaaaggggcgatagagagtttctgcgaggaagggaaggaatccgtatgcctgaaaacttttgtacaagtgtctttgtaagggcgaggtctgctctgacatctctctgagatctgagatctgatacctgcaggataacttcgtataatgtatgctatacgaagttatgtcacagtatcggcatctctgtctcgacgacagtgagtatagtcaactatgctatctagtagccaaagtaagtctacattccgggctttgcaggggttagctatttcattagacaatacttacaaccttcgaagggcttccccagaattcaattctatattgattcaatatccacccatcggacccgctctccgtaccccctgttcgcttcgccactacaaccatgtcaagacctgagaatcgtagcaaattgccccactacggcccgagtgctgtcggctggttaaagtagaatgacttgggtagccagatcgagacgcctgacattgatacgcagacagcgcagtcagtttcaaactgacaactgacgcgtactggattgacaggactccttggccggtgccattcgaatcgcttgtagacctcttgccagcatcttgccagagaagcttgaaggctggatcgctcagcctgagctcacacttagtagctccactagtcactcaggtgctcagcctctcctcagcgcctcaagctcaagcctcagggcctcagctgcatcgagctctggtgccagtgccagtgccagtgccagtgccagtgccagtgccagtgccagtgaagagagtggtatgagccaagctatacccaaaagcaaatgatggttattgccagcttccatgcacccctggggcgaaggacaacgaacaacagacagagtttgaattattcactggcctagtactaccaatttaaatttggtggttcagcgcaggaacggcgcgagtgagcgtaagggcaaactccgcatggggcgtgacgtcagtgtccctctggctgaggcactccagcaggctctggtcaacgcatcaacgtgtgtgtgtgtctaccaagcacattgtgcgctcgctgtccgtgcgccgaaatcgcaccagtcagaacgtctataaaacccctcttgcttggagggttaccgggccgtcttttcccaacgctccggctcactcactactctacacaacaaatggccgaattttccgctgatttgtgcctcttcgaccttgacggaactatcgtctcgactaccgttgcggcagagaaggcgtggaccaagctctgctacgaatacggtgtggatccgtcggaactgttcaagcattctcacggtgcccgcacccaggaagttctccgtcgcttctttccgaaactggatgataccgataacaaaggagtgcttgcacttgagaaggatattgctcattcctatctcgacaccgtgtcccttatccctggagccgaaaacctccttctctccctggacgtcgatacagaaactcagaagaaactgccagaacgaaaatgggccattgtcacctccggcagcccctacctggccttctcctggttcgaaactattcttaaaaatgttggcaagcctaaagtctttatcacgggatttgacgtcaagaacggcaaacccgacccagaaggttactctcgtgcgcgagatttgttgcgacaggatctgcagttgaccggaaaacaggatttgaaatatgtcgtcttcgaagacgctcccgttggtatcaaagccggcaaggcgatgggcgccatcacggtcggaatcacttccagctacgacaagtctgtcttgtttgatgcgggtgctgactacgtggtttgcgatttgacacaggtttccgttgtcaaaaataatgagaacggcattgtgattcaagtcaataacccgttgacacgtgcttaacacggatcaacaaaaatgtgcgccagctttgttgtgtgcccttttcctctagcggatcctatccacatttcgtgaatgaaccgattaagctctgacgagatttccttgttttctgtagatacctcttgtagaggtgtcaaagttatgttgtgatcgagagagttacctgcaaggtattatgcaagcggcttgatgaggacactcaactacgtgtgagtaggagtgcgttgctcagcagttgacgcgtgagccgcttgagcagcttgataaaggtcctaatcgtcttccagctgttggcagacgacaatgtgctgtagtagtaggataggcccgtaaaagtgtagaagcaataggttgagactgactgtaatgggtacttgcgttcaaagactgaaagtccaaaggattgctcaaaggcccctgaggtctgagcctctgagcgcgctcttcgtcaaaattcgccggggccatcggtcatcctctcgagggcagcatcttcctgcttgaagactgagtccgtctcaggcttgctggtcacattattgtcagtacctaccatgaagaattcaatattattttacattgtcaaccattacatggatcccatgttgtgcatagcctctatgtcatcctttggtcttttatgtctgtagcgtgctagtagtattcaagttgtagcactgctgtgaaacagtacgttcaagtagtgtgcagcagtacgttcagttagtggactggggcagcctcgccttcagcaaaggttaggtacatgagccagttgctcactcttgctttctacgaatcccataggctactttgccccctaaccgtgacgaccccctgtgtttgagaagtttgagtctttttacgttaccgtgaccaagcgagcagagtagaaactcttgaagttgtgtatgtaagaatacaaattgagaacacaaggttacctacctttatagttggtaaacagcaagcaataccagagattttcatcgcaacgtgactctatcattcactatattaagttgcacacggatgttgtacaacactacacgtaaaagagagaaaaatactaatgtcgatcgctcaggt

SEQ ID NO: 278 - DNA, 741 bp, synthetic construct
  source 1..741: mol_type = other DNA
atggccgaattttccgctgatttgtgcctcttcgaccttgacggaactatcgtctcgactaccgttgcggcagagaaggcgtggaccaagctctgctacgaatacggtgtggatccgtcggaactgttcaagcattctcacggtgcccgcacccaggaagttctccgtcgcttctttccgaaactggatgataccgataacaaaggagtgcttgcacttgagaaggatattgctcattcctatctcgacaccgtgtcccttatccctggagccgaaaacctccttctctccctggacgtcgatacagaaactcagaagaaactgccagaacgaaaatgggccattgtcacctccggcagcccctacctggccttctcctggttcgaaactattcttaaaaatgttggcaagcctaaagtctttatcacgggatttgacgtcaagaacggcaaacccgacccagaaggttactctcgtgcgcgagatttgttgcgacaggatctgcagttgaccggaaaacaggatttgaaatatgtcgtcttcgaagacgctcccgttggtatcaaagccggcaaggcgatgggcgccatcacggtcggaatcacttccagctacgacaagtctgtcttgtttgatgcgggtgctgactacgtggtttgcgatttgacacaggtttccgttgtcaaaaataatgagaacggcattgtgattcaagtcaataacccgttgacacgtgcttaa

SEQ ID NO: 279 - DNA, 1729 bp, synthetic construct
  source 1..1729: mol_type = other DNA
cttaaacacggcaagggtagcgttgcaaacgacgtaaccgacgaaatggtccgtctgaattggctaactgagttcatgccactccccaccatcaagcacttcatccgtacacctgacgatgcgtggctgttgactacggccatccccggtaagaccgcttttcaggtcctcgaggaataccctgactcgggcgagaacatcgtggatgccttggctgtgtttttgcgccgccttcactctattccggtctgcaactgccctttcaacagcgaccgtgtttttaggcttgcccaggcacaatcacgcatgaacaatggtctagtcgacgctagtgatttcgatgacgagcgcaacggctggccggtggaacaagtgtggaaagagatgcataagctcctgcccttttccccagactctgtcgtgacgcatggtgatttctcgcttgacaacctcatctttgacgagggcaagctcattggctgcattgacgtcggccgggttggcatcgccgatcgctaccaagatcttgcgatcctctggaattgtctgggcgagttctcccctagcctccagaagcgtctgttccagaaatatgggatcgataacccagacatgaacaagctccagttccatttgatgctggatgaatttttctaatggtgttcaccactgttgcttcccctttgttggagcgtccgtcgttctgatggcgctctgagcccaaaatatcccttcttcgcccgagagcaagcctcggagtgtgcttgcaatctacttttcctactaaagttatcttcttgtggcttctgaatttgaatagaacgtgttcagacttgttagctaaatttgttgatgcgagatacttgacagaatcccgttgatgaactcatctgtgtgaccaccgcctggtgatggaatctcgcgcggaagccgtggtgttactgactctcaagcaattcagtagataaatttgtataacatcattgcaaggggtgctagcaatcaattgtccaataccaaacggcggcaagtgcaaaggggcgatagagagtttctgcgaggaagggaaggaatccgtatgcctgaaaacttttgtacaagtgtctttgtaagggcgaggtctgctctgacatctctctgagatctgagatctgatacctgcaggataacttcgtataatgtatgctatacgaagttataagcttgaagactgagtccgtctcagttgctgctacgacctcattgatcgatgatctccgacactttgagtagctttccatcctctctttactgtactttgtattcttgctactttgtgttctttcttaatggtcccgaaccggtgattttgctcatgatctttttttttttttttcgtcaactgcaagaagatgaaaaatctactgttcgatagcacctcataaccgttccagagtcccgacaaccacaaggatgtttcttagataggtgtcagcaagatccacaaaaaagtgtaggtattagatggtttcaagcaaggtacaatattctaattcaatactcatttgaataatcaatattcaacagcttctagcctacaagcttcaatgttctccgtcggttaactcagtatacttagtactcagttcaagtcagtgttgttaaaataaaatcacgtgatccaaaaacttgaaacttttcatttttctcctcagatgttggtgattcgtcccatagcggttaccacaac

SEQ ID NO: 280 - DNA, 4285 bp, synthetic construct
  source 1..4285: mol_type = other DNA
tggcatgtaggcctgtaggggctatgcctatatgctcatgcactcatgtcgcgatgttgcgatatcgcgatggaccaaccaagcaagcgtgcagcgtgggcgcttgggccaagggtgctaagctaagtgtaagcactgaagtgctgaagtgctgaagtgctgaacgtggaacgtcaggatgacacatcctctcccttcggcttcgtccaagaaaggttggtcagccatctgagatctgagatctgaaatgaatataatgatgaattgagtcgatgagatctgactatcttgggagattgcaccaatgcgccacggtgaccagatggtcttggtcttagctggtatagtggcacctgatctgccttgacagatctcatgttcatacgttcatgcattcaatcttatcgtctagccgtctgcgatctgcccaactagacgacgacaaatgtaattgatccttgtaaccctgttgctggtcgcagcagcgcgatacgatgccgtcacagtatcggcatctctgtctcgacgacagtgagtatagtcaactatgctatctagtagccaaagtaagtctacattccgggctttgcaggggttagctatttcattagacaatacttacaaccttcgaagggcttccccagaattcaattctatattgattcaatatccacccatcggacccgctctccgtaccccctgttcgcttcgccactacaaccatgtcaagacctgagaatcgtagcaaattgccccactacggcccgagtgctgtcggctggttaaagtagaatgacttgggtagccagatcgagacgcctgacattgatacgcagacagcgcagtcagtttcaaactgacaactgacgcgtactggattgacaggactccttggccggtgccattcgaatcgcttgtagacctcttgccagcatcttgccagagaagcttgaaggctggatcgctcagcctgagctcacacttagtagctccactagtcactcaggtgctcagcctctcctcagcgcctcaagctcaagcctcagggcctcagctgcatcgagctctggtgccagtgccagtgccagtgccagtgccagtgccagtgccagtgccagtgaagagagtggtatgagccaagctatacccaaaagcaaatgatggttattgccagcttccatgcacccctggggcgaaggacaacgaacaacagacagagtttgaattattcactggcctagtactaccaatttaaatttggtggttcagcgcaggaacggcgcgagtgagcgtaagggcaaactccgcatggggcgtgacgtcagtgtccctctggctgaggcactccagcaggctctggtcaacgcatcaacgtgtgtgtgtgtctaccaagcacattgtgcgctcgctgtccgtgcgccgaaatcgcaccagtcagaacgtctataaaacccctcttgcttggagggttaccgggccgtcttttcccaacgctccggctcactcactactctacacaacaaatggttaccgagatcgaagtggatgcggtgctgttcgacatggacggcaccctgattgactctacccctgctgtcaaccagacttgggccgagtacatcgaacgatacaacctcgactttgactacgtcatgtctcattgtcacggatgtcgaacggtagagagcctcaagaatatcgttggattgccggatgaccagttggaacaaggcgtagtcgagtttgaagggcgtattagtgaactggctgaagaggcggcacgtaccaatggtcctggtcaaattgtggctttgcccggcgcaaaagaactgcttgcccaactgaacaagggtagcgaacaacctggtcgtcgtcctggatgggccatcgttacttcggcaaccaaggcttacgcttacgtgggcttcagagcgtcgggcgtgaatggtacagaattccctcgtgcttttgtcacgggtgacaatgtcagcaagggcaaacctgatcctgaaccatacctcttgggagcaaagacgttacaacctcctgctgatcctaaacgttgtctcgtaatcgaagatgctcctccaggtattcgatcaggtgttgctgcaggtgccaaaacccttggattgaccactacccacgcggaaaacctcatgtggcaagcgggtgctaactgggtcgtaccagacttatcgagtgtttcggcacgttgggaaggtgaaggtgcggacgctcgtctttttattcgcattgaaaactcaggccagcgtccagagtaacacgaagggtttcccatctgtgtgacctgatccctttttacgtttttttgttttgttttttcttttgttcatgatcaacttgggagtgattcctcttggtgatgtcgaaaattgaactgttataccaatattctgttgcctttgtttcctgtttgtagtttactactttttacagtagtcgttgttcctgccttgcttgcgtttgtcagggtttccctttagcttagtaccaatatctagccttaattttgcttattctttctcaccgcccatgattgatttcaatcatgattaatgatttatgcatgaaaactcaaaatactcaattgtcttgtacaaggcaatcacaagctggtcagccattctcagcgcctataagagctttcagccaggccggccccaaaacgatctaccctgtggacctggctaggctaaactttggaaagtcatgcaattatgaacgtttgaagctcaagcgctcctaccctctcctggagcagtgcttgaagactgagtccgtctcagataacttcgtataatgtatgctatacgaagttatcctgcaggagctcagaccttgcatgttagccttgaccttgcctctatgaccactaattcgcacaagattgcacgttaccattgtcatcttgccatgtatccaatgtttcctgtttgccatagtacgtagtagatacatcgatcatcgatgcagatgacgcagatggcattggttcgctttgccctatgcatgcatcatgcatcatgcatcatgcgtcatgcgtcactatccatattaatcattgccctctgtactaggccatgacacctgcagacccttccccagggatgcttcttgtaatagccaatatactacacaactttaccgattacgatcgagatcgatctcactatagtttgtcgaacttcgatgcacatcgagggtgcggaaaaaagctgacggaagcggaagtgggtgaattggttaatttagttagattggcagggttgttcccaagattcaacgcaagctgagaaagaaaacagaaacacgaggcataaggccagtcagaaaatgcattacgaggggagttgaagtgactgtgggccagtgcctgggtcgtcatgtgcaaattttttcttcggttagactgccgcagcatgcagcaactctgccggccctatataactagtgcttcatcttcttgtcattcttgtctctttaccaacacaccggtactctttcaccatgggtaaggaaaagacacacgtatcgcgaccccgactcaactccaacatggacgcagacctgtacggatacaaatgggctcgagataatgtcggacagtcgggtgcgacgatctacagactctatggaaaaccggacgcccccgagctctttcttaaacacggcaagggtagcgttgcaaacgacgtaaccgacgaaatggtccgtctgaattggctaactgagttcatgccactccccaccatcaagcacttcatccgtacacctgacgatgcgtggctgttgactacggccatccccggtaagaccgcttttcaggtcctcgaggaataccctgactcgggcgagaacatcgtggatgccttggctgtgtttttgcgccgccttcactctattccggtctgcaactgccctttcaacagcgaccgtgtttttaggcttgcccaggcacaatcacgcatgaacaatggtctagtcgacgctagtgatttcgatgacgagcgcaacggctggccggtggaacaagtgtggaaagagatgcataagctcctgcccttttccccagactctgtcgtgacgcatggtgatttctcgcttgacaacctcatctttgacgagggcaagctcattggctgcattgacgtcggccgggttggcatcgccgatcgctaccaagatcttgcgatcctctggaattgtctgggcgagttctcccctagcctccagaagcgtctgttccagaaatatgggatcg

SEQ ID NO: 281 - DNA, 4327 bp, synthetic construct
  source 1..4327: mol_type = other DNA
tggcatgtaggcctgtaggggctatgcctatatgctcatgcactcatgtcgcgatgttgcgatatcgcgatggaccaaccaagcaagcgtgcagcgtgggcgcttgggccaagggtgctaagctaagtgtaagcactgaagtgctgaagtgctgaagtgctgaacgtggaacgtcaggatgacacatcctctcccttcggcttcgtccaagaaaggttggtcagccatctgagatctgagatctgaaatgaatataatgatgaattgagtcgatgagatctgactatcttgggagattgcaccaatgcgccacggtgaccagatggtcttggtcttagctggtatagtggcacctgatctgccttgacagatctcatgttcatacgttcatgcattcaatcttatcgtctagccgtctgcgatctgcccaactagacgacgacaaatgtaattgatccttgtaaccctgttgctggtcgcagcagcgcgatacgatgccgtcacagtatcggcatctctgtctcgacgacagtgagtatagtcaactatgctatctagtagccaaagtaagtctacattccgggctttgcaggggttagctatttcattagacaatacttacaaccttcgaagggcttccccagaattcaattctatattgattcaatatccacccatcggacccgctctccgtaccccctgttcgcttcgccactacaaccatgtcaagacctgagaatcgtagcaaattgccccactacggcccgagtgctgtcggctggttaaagtagaatgacttgggtagccagatcgagacgcctgacattgatacgcagacagcgcagtcagtttcaaactgacaactgacgcgtactggattgacaggactccttggccggtgccattcgaatcgcttgtagacctcttgccagcatcttgccagagaagcttgaaggctggatcgctcagcctgagctcacacttagtagctccactagtcactcaggtgctcagcctctcctcagcgcctcaagctcaagcctcagggcctcagctgcatcgagctctggtgccagtgccagtgccagtgccagtgccagtgccagtgccagtgccagtgaagagagtggtatgagccaagctatacccaaaagcaaatgatggttattgccagcttccatgcacccctggggcgaaggacaacgaacaacagacagagtttgaattattcactggcctagtactaccaatttaaatttggtggttcagcgcaggaacggcgcgagtgagcgtaagggcaaactccgcatggggcgtgacgtcagtgtccctctggctgaggcactccagcaggctctggtcaacgcatcaacgtgtgtgtgtgtctaccaagcacattgtgcgctcgctgtccgtgcgccgaaatcgcaccagtcagaacgtctataaaacccctcttgcttggagggttaccgggccgtcttttcccaacgctccggctcactcactactctacacaacaaatgggctcgacgactacgacacttccagcaatgaagacctctccaaaatacgttttctttaccgacttcgatggcacaattacaacgcgtgactctaacgactttatgacggataacttgggcttcggtcaagaactgcgtaagcagggaaaccgcgatgtccttgacggacgcaagacgtttcgcgactcgttccagtcgatgatggacagcatcaaaaccccgtattctaaatgtattgagacgcttattgagaacattaaattggatccaggcttcaaagagttctacgagtgggcacgcgaaaacaacatcccggtggttattcttagcggcggcatggagcccattatccgagccctgctcgaacatctcctgggcaaaaaagaggcagcagaaatccagatcgtcagcaatcaagttgaggtgcgcaagggatttaagtccctggatgaagaaggtggttggaacattgtctatcacgatgagtcgcattttggccacgacaagtctcgcgaaattcgtccctatgcagagctgcctgatgaccagcgaccgactatgttttacgccggtgacggagtgtctgacctgtcggccgctaaagagacggacctgctgtttgcgaagaagggtcacgatctgatcacgtattgcgtccgagaaaaggttccatttactattttcgaggactggacgtcgattctttccactgtccaggacgtcgtggcaggaaaaaccacagtgaaggaagtgtacgcggccggaattaaggattttgaacaaggtgcagacaaggcctaacacgaagggtttcccatctgtgtgacctgatccctttttacgtttttttgttttgttttttcttttgttcatgatcaacttgggagtgattcctcttggtgatgtcgaaaattgaactgttataccaatattctgttgcctttgtttcctgtttgtagtttactactttttacagtagtcgttgttcctgccttgcttgcgtttgtcagggtttccctttagcttagtaccaatatctagccttaattttgcttattctttctcaccgcccatgattgatttcaatcatgattaatgatttatgcatgaaaactcaaaatactcaattgtcttgtacaaggcaatcacaagctggtcagccattctcagcgcctataagagctttcagccaggccggccccaaaacgatctaccctgtggacctggctaggctaaactttggaaagtcatgcaattatgaacgtttgaagctcaagcgctcctaccctctcctggagcagtgcttgaagactgagtccgtctcagataacttcgtataatgtatgctatacgaagttatcctgcaggagctcagaccttgcatgttagccttgaccttgcctctatgaccactaattcgcacaagattgcacgttaccattgtcatcttgccatgtatccaatgtttcctgtttgccatagtacgtagtagatacatcgatcatcgatgcagatgacgcagatggcattggttcgctttgccctatgcatgcatcatgcatcatgcatcatgcgtcatgcgtcactatccatattaatcattgccctctgtactaggccatgacacctgcagacccttccccagggatgcttcttgtaatagccaatatactacacaactttaccgattacgatcgagatcgatctcactatagtttgtcgaacttcgatgcacatcgagggtgcggaaaaaagctgacggaagcggaagtgggtgaattggttaatttagttagattggcagggttgttcccaagattcaacgcaagctgagaaagaaaacagaaacacgaggcataaggccagtcagaaaatgcattacgaggggagttgaagtgactgtgggccagtgcctgggtcgtcatgtgcaaattttttcttcggttagactgccgcagcatgcagcaactctgccggccctatataactagtgcttcatcttcttgtcattcttgtctctttaccaacacaccggtactctttcaccatgggtaaggaaaagacacacgtatcgcgaccccgactcaactccaacatggacgcagacctgtacggatacaaatgggctcgagataatgtcggacagtcgggtgcgacgatctacagactctatggaaaaccggacgcccccgagctctttcttaaacacggcaagggtagcgttgcaaacgacgtaaccgacgaaatggtccgtctgaattggctaactgagttcatgccactccccaccatcaagcacttcatccgtacacctgacgatgcgtggctgttgactacggccatccccggtaagaccgcttttcaggtcctcgaggaataccctgactcgggcgagaacatcgtggatgccttggctgtgtttttgcgccgccttcactctattccggtctgcaactgccctttcaacagcgaccgtgtttttaggcttgcccaggcacaatcacgcatgaacaatggtctagtcgacgctagtgatttcgatgacgagcgcaacggctggccggtggaacaagtgtggaaagagatgcataagctcctgcccttttccccagactctgtcgtgacgcatggtgatttctcgcttgacaacctcatctttgacgagggcaagctcattggctgcattgacgtcggccgggttggcatcgccgatcgctaccaagatcttgcgatcctctggaattgtctgggcgagttctcccctagcctccagaagcgtctgttccagaaatatgggatcg

SEQ ID NO: 282 - DNA, 4249 bp, synthetic construct
  source 1..4249: mol_type = other DNA
tggcatgtaggcctgtaggggctatgcctatatgctcatgcactcatgtcgcgatgttgcgatatcgcgatggaccaaccaagcaagcgtgcagcgtgggcgcttgggccaagggtgctaagctaagtgtaagcactgaagtgctgaagtgctgaagtgctgaacgtggaacgtcaggatgacacatcctctcccttcggcttcgtccaagaaaggttggtcagccatctgagatctgagatctgaaatgaatataatgatgaattgagtcgatgagatctgactatcttgggagattgcaccaatgcgccacggtgaccagatggtcttggtcttagctggtatagtggcacctgatctgccttgacagatctcatgttcatacgttcatgcattcaatcttatcgtctagccgtctgcgatctgcccaactagacgacgacaaatgtaattgatccttgtaaccctgttgctggtcgcagcagcgcgatacgatgccgtcacagtatcggcatctctgtctcgacgacagtgagtatagtcaactatgctatctagtagccaaagtaagtctacattccgggctttgcaggggttagctatttcattagacaatacttacaaccttcgaagggcttccccagaattcaattctatattgattcaatatccacccatcggacccgctctccgtaccccctgttcgcttcgccactacaaccatgtcaagacctgagaatcgtagcaaattgccccactacggcccgagtgctgtcggctggttaaagtagaatgacttgggtagccagatcgagacgcctgacattgatacgcagacagcgcagtcagtttcaaactgacaactgacgcgtactggattgacaggactccttggccggtgccattcgaatcgcttgtagacctcttgccagcatcttgccagagaagcttgaaggctggatcgctcagcctgagctcacacttagtagctccactagtcactcaggtgctcagcctctcctcagcgcctcaagctcaagcctcagggcctcagctgcatcgagctctggtgccagtgccagtgccagtgccagtgccagtgccagtgccagtgccagtgaagagagtggtatgagccaagctatacccaaaagcaaatgatggttattgccagcttccatgcacccctggggcgaaggacaacgaacaacagacagagtttgaattattcactggcctagtactaccaatttaaatttggtggttcagcgcaggaacggcgcgagtgagcgtaagggcaaactccgcatggggcgtgacgtcagtgtccctctggctgaggcactccagcaggctctggtcaacgcatcaacgtgtgtgtgtgtctaccaagcacattgtgcgctcgctgtccgtgcgccgaaatcgcaccagtcagaacgtctataaaacccctcttgcttggagggttaccgggccgtcttttcccaacgctccggctcactcactactctacacaacaaatggtgaaggctgttatcttttctgactttgatggcacaatcacttggcaagactccaacgattacctcactgatacgctcggctttggtaaggaagagcgcctgaaaatcttcgagggcgtcttggatggaaccaagccctttcgagagggtttcacacaaatgattagcagcattgagactccactcccagaatgtttggctatcctcaaagaaaaaattcaacttgaccctggattcaagaagacctatgaatggagcctggagcatagcgtccctttgatcgtggtttcctcgggcatgaaaccaattatcaaagcactcttggagaacatgcttggtgaggaagcgatcaaaaatcttgagatcgtggcaaatgacgtcgagcttgatgcaaacaataagatgacggtcacgtaccgcgacgaaactcctttcggtcatgataaatccaagtccattgacaattttaaggcccattacgaggcgcagctgccggaaggagctgaaaagccgacttatttctactgtggcgacggcatctccgatctgtcggcagcgaaagagtgcgatttgctctttgcgaaacgtggtaaagatcttgtgacgtattgcaagcgtcaaaacgtccccttccacgaattcgatacttttgaggatattctccgaagcatgaaccaagtcctcgatggagagaaaacggtttctgagcttatggagaactaacacgaagggtttcccatctgtgtgacctgatccctttttacgtttttttgttttgttttttcttttgttcatgatcaacttgggagtgattcctcttggtgatgtcgaaaattgaactgttataccaatattctgttgcctttgtttcctgtttgtagtttactactttttacagtagtcgttgttcctgccttgcttgcgtttgtcagggtttccctttagcttagtaccaatatctagccttaattttgcttattctttctcaccgcccatgattgatttcaatcatgattaatgatttatgcatgaaaactcaaaatactcaattgtcttgtacaaggcaatcacaagctggtcagccattctcagcgcctataagagctttcagccaggccggccccaaaacgatctaccctgtggacctggctaggctaaactttggaaagtcatgcaattatgaacgtttgaagctcaagcgctcctaccctctcctggagcagtgcttgaagactgagtccgtctcagataacttcgtataatgtatgctatacgaagttatcctgcaggagctcagaccttgcatgttagccttgaccttgcctctatgaccactaattcgcacaagattgcacgttaccattgtcatcttgccatgtatccaatgtttcctgtttgccatagtacgtagtagatacatcgatcatcgatgcagatgacgcagatggcattggttcgctttgccctatgcatgcatcatgcatcatgcatcatgcgtcatgcgtcactatccatattaatcattgccctctgtactaggccatgacacctgcagacccttccccagggatgcttcttgtaatagccaatatactacacaactttaccgattacgatcgagatcgatctcactatagtttgtcgaacttcgatgcacatcgagggtgcggaaaaaagctgacggaagcggaagtgggtgaattggttaatttagttagattggcagggttgttcccaagattcaacgcaagctgagaaagaaaacagaaacacgaggcataaggccagtcagaaaatgcattacgaggggagttgaagtgactgtgggccagtgcctgggtcgtcatgtgcaaattttttcttcggttagactgccgcagcatgcagcaactctgccggccctatataactagtgcttcatcttcttgtcattcttgtctctttaccaacacaccggtactctttcaccatgggtaaggaaaagacacacgtatcgcgaccccgactcaactccaacatggacgcagacctgtacggatacaaatgggctcgagataatgtcggacagtcgggtgcgacgatctacagactctatggaaaaccggacgcccccgagctctttcttaaacacggcaagggtagcgttgcaaacgacgtaaccgacgaaatggtccgtctgaattggctaactgagttcatgccactccccaccatcaagcacttcatccgtacacctgacgatgcgtggctgttgactacggccatccccggtaagaccgcttttcaggtcctcgaggaataccctgactcgggcgagaacatcgtggatgccttggctgtgtttttgcgccgccttcactctattccggtctgcaactgccctttcaacagcgaccgtgtttttaggcttgcccaggcacaatcacgcatgaacaatggtctagtcgacgctagtgatttcgatgacgagcgcaacggctggccggtggaacaagtgtggaaagagatgcataagctcctgcccttttccccagactctgtcgtgacgcatggtgatttctcgcttgacaacctcatctttgacgagggcaagctcattggctgcattgacgtcggccgggttggcatcgccgatcgctaccaagatcttgcgatcctctggaattgtctgggcgagttctcccctagcctccagaagcgtctgttccagaaatatgggatcg

SEQ ID NO: 283 - DNA, 4297 bp, synthetic construct
  source 1..4297: mol_type = other DNA
tggcatgtaggcctgtaggggctatgcctatatgctcatgcactcatgtcgcgatgttgcgatatcgcgatggaccaaccaagcaagcgtgcagcgtgggcgcttgggccaagggtgctaagctaagtgtaagcactgaagtgctgaagtgctgaagtgctgaacgtggaacgtcaggatgacacatcctctcccttcggcttcgtccaagaaaggttggtcagccatctgagatctgagatctgaaatgaatataatgatgaattgagtcgatgagatctgactatcttgggagattgcaccaatgcgccacggtgaccagatggtcttggtcttagctggtatagtggcacctgatctgccttgacagatctcatgttcatacgttcatgcattcaatcttatcgtctagccgtctgcgatctgcccaactagacgacgacaaatgtaattgatccttgtaaccctgttgctggtcgcagcagcgcgatacgatgccgtcacagtatcggcatctctgtctcgacgacagtgagtatagtcaactatgctatctagtagccaaagtaagtctacattccgggctttgcaggggttagctatttcattagacaatacttacaaccttcgaagggcttccccagaattcaattctatattgattcaatatccacccatcggacccgctctccgtaccccctgttcgcttcgccactacaaccatgtcaagacctgagaatcgtagcaaattgccccactacggcccgagtgctgtcggctggttaaagtagaatgacttgggtagccagatcgagacgcctgacattgatacgcagacagcgcagtcagtttcaaactgacaactgacgcgtactggattgacaggactccttggccggtgccattcgaatcgcttgtagacctcttgccagcatcttgccagagaagcttgaaggctggatcgctcagcctgagctcacacttagtagctccactagtcactcaggtgctcagcctctcctcagcgcctcaagctcaagcctcagggcctcagctgcatcgagctctggtgccagtgccagtgccagtgccagtgccagtgccagtgccagtgccagtgaagagagtggtatgagccaagctatacccaaaagcaaatgatggttattgccagcttccatgcacccctggggcgaaggacaacgaacaacagacagagtttgaattattcactggcctagtactaccaatttaaatttggtggttcagcgcaggaacggcgcgagtgagcgtaagggcaaactccgcatggggcgtgacgtcagtgtccctctggctgaggcactccagcaggctctggtcaacgcatcaacgtgtgtgtgtgtctaccaagcacattgtgcgctcgctgtccgtgcgccgaaatcgcaccagtcagaacgtctataaaacccctcttgcttggagggttaccgggccgtcttttcccaacgctccggctcactcactactctacacaacaaatgggttccaccctggacatcgcactccctgcgcttaagactaagccgaagttcatcttcttcacagattttgatggcactattactcaacaagattcgaacgactggatgactgataatttgggatttggcgcggagcttcgcaaaaagggtaatgaggacgtgttgtttggccgtcgcgacttccgtgattctttcgcagatatgctggattccattaagaccccgtttaatgaatgcattgaacttcttctcaaaaacattactcttgatccgggtttcaagcagttcttcgagtgggcaaaagaaaataatgttcccatcgtcattttgtcgggcggaatggaaccagtcatccgcgcgttgttggcacatatgctcggtaaagaagaggcagaaacgcttcaaattgtctcgaacgatgtcgcaccccgtccgggtaagtctgttaatgaggcgggcggatggcacatcgtttaccatgatgacagcggcttcggtcatgacaaatcgcttgaaatccgtccgtacgcacgcctcccggcagaagagcgccctgttctgttttatgcgggtgacggagtctctgacctgtctgctgcgaaagagacggatctcctcttcgcaaaatctggtcgcgatcttgtctcgtattgcgaacgtgagaacgtgccatttaccacgtttcaagattttacagaaatcttggcaacggttaaagacatcgttgcaggcaagacgactgttaaggaagctgccactggacgaaaataacacgaagggtttcccatctgtgtgacctgatccctttttacgtttttttgttttgttttttcttttgttcatgatcaacttgggagtgattcctcttggtgatgtcgaaaattgaactgttataccaatattctgttgcctttgtttcctgtttgtagtttactactttttacagtagtcgttgttcctgccttgcttgcgtttgtcagggtttccctttagcttagtaccaatatctagccttaattttgcttattctttctcaccgcccatgattgatttcaatcatgattaatgatttatgcatgaaaactcaaaatactcaattgtcttgtacaaggcaatcacaagctggtcagccattctcagcgcctataagagctttcagccaggccggccccaaaacgatctaccctgtggacctggctaggctaaactttggaaagtcatgcaattatgaacgtttgaagctcaagcgctcctaccctctcctggagcagtgcttgaagactgagtccgtctcagataacttcgtataatgtatgctatacgaagttatcctgcaggagctcagaccttgcatgttagccttgaccttgcctctatgaccactaattcgcacaagattgcacgttaccattgtcatcttgccatgtatccaatgtttcctgtttgccatagtacgtagtagatacatcgatcatcgatgcagatgacgcagatggcattggttcgctttgccctatgcatgcatcatgcatcatgcatcatgcgtcatgcgtcactatccatattaatcattgccctctgtactaggccatgacacctgcagacccttccccagggatgcttcttgtaatagccaatatactacacaactttaccgattacgatcgagatcgatctcactatagtttgtcgaacttcgatgcacatcgagggtgcggaaaaaagctgacggaagcggaagtgggtgaattggttaatttagttagattggcagggttgttcccaagattcaacgcaagctgagaaagaaaacagaaacacgaggcataaggccagtcagaaaatgcattacgaggggagttgaagtgactgtgggccagtgcctgggtcgtcatgtgcaaattttttcttcggttagactgccgcagcatgcagcaactctgccggccctatataactagtgcttcatcttcttgtcattcttgtctctttaccaacacaccggtactctttcaccatgggtaaggaaaagacacacgtatcgcgaccccgactcaactccaacatggacgcagacctgtacggatacaaatgggctcgagataatgtcggacagtcgggtgcgacgatctacagactctatggaaaaccggacgcccccgagctctttcttaaacacggcaagggtagcgttgcaaacgacgtaaccgacgaaatggtccgtctgaattggctaactgagttcatgccactccccaccatcaagcacttcatccgtacacctgacgatgcgtggctgttgactacggccatccccggtaagaccgcttttcaggtcctcgaggaataccctgactcgggcgagaacatcgtggatgccttggctgtgtttttgcgccgccttcactctattccggtctgcaactgccctttcaacagcgaccgtgtttttaggcttgcccaggcacaatcacgcatgaacaatggtctagtcgacgctagtgatttcgatgacgagcgcaacggctggccggtggaacaagtgtggaaagagatgcataagctcctgcccttttccccagactctgtcgtgacgcatggtgatttctcgcttgacaacctcatctttgacgagggcaagctcattggctgcattgacgtcggccgggttggcatcgccgatcgctaccaagatcttgcgatcctctggaattgtctgggcgagttctcccctagcctccagaagcgtctgttccagaaatatgggatcg

SEQ ID NO: 284 - DNA, 4246 bp, synthetic construct
  source 1..4246: mol_type = other DNA
tggcatgtaggcctgtaggggctatgcctatatgctcatgcactcatgtcgcgatgttgcgatatcgcgatggaccaaccaagcaagcgtgcagcgtgggcgcttgggccaagggtgctaagctaagtgtaagcactgaagtgctgaagtgctgaagtgctgaacgtggaacgtcaggatgacacatcctctcccttcggcttcgtccaagaaaggttggtcagccatctgagatctgagatctgaaatgaatataatgatgaattgagtcgatgagatctgactatcttgggagattgcaccaatgcgccacggtgaccagatggtcttggtcttagctggtatagtggcacctgatctgccttgacagatctcatgttcatacgttcatgcattcaatcttatcgtctagccgtctgcgatctgcccaactagacgacgacaaatgtaattgatccttgtaaccctgttgctggtcgcagcagcgcgatacgatgccgtcacagtatcggcatctctgtctcgacgacagtgagtatagtcaactatgctatctagtagccaaagtaagtctacattccgggctttgcaggggttagctatttcattagacaatacttacaaccttcgaagggcttccccagaattcaattctatattgattcaatatccacccatcggacccgctctccgtaccccctgttcgcttcgccactacaaccatgtcaagacctgagaatcgtagcaaattgccccactacggcccgagtgctgtcggctggttaaagtagaatgacttgggtagccagatcgagacgcctgacattgatacgcagacagcgcagtcagtttcaaactgacaactgacgcgtactggattgacaggactccttggccggtgccattcgaatcgcttgtagacctcttgccagcatcttgccagagaagcttgaaggctggatcgctcagcctgagctcacacttagtagctccactagtcactcaggtgctcagcctctcctcagcgcctcaagctcaagcctcagggcctcagctgcatcgagctctggtgccagtgccagtgccagtgccagtgccagtgccagtgccagtgccagtgaagagagtggtatgagccaagctatacccaaaagcaaatgatggttattgccagcttccatgcacccctggggcgaaggacaacgaacaacagacagagtttgaattattcactggcctagtactaccaatttaaatttggtggttcagcgcaggaacggcgcgagtgagcgtaagggcaaactccgcatggggcgtgacgtcagtgtccctctggctgaggcactccagcaggctctggtcaacgcatcaacgtgtgtgtgtgtctaccaagcacattgtgcgctcgctgtccgtgcgccgaaatcgcaccagtcagaacgtctataaaacccctcttgcttggagggttaccgggccgtcttttcccaacgctccggctcactcactactctacacaacaaatggtgaaagctgtcatcttttcggattttgacggtacgatcacactccaggattccaatgacttcttggtcgataataagggaatgggaaagaatgatcgtttgaaacttttcgagggtgtcttgaatggcacgaaaaattttcgtgacatcttcagcgacatgctgggtagcctgaatcttacccaggaagagggtattgagttcttgaaagagaatatcgaacttgacccaggattcaaaaagacgttcctgtgggcccaagaaaacaacgtcccgcttattgtcgtttcgtccggaaccgttccggtgattcgtgcactccttactaagatgatcggttccgacattgagaaacttgacatcgtctctaatgacctggaggtgaatgaatcgaaccactggaccgttctttaccgcgactcgactccacacggtcatgacaagagcaagacaattgacgactataaatctaaatacgaatcccaacttgtcgagggtgaggagcgtccggtctatttctactgcggcgacggtatctccgacctcactgcagccaaagagtgtgaccttttgtttgccaaggcaggtaaggatctcatcacattttgtaaaaagcagaacgtgccctatcacgagtttaatacatgggatgacatcctgcgctcgatgaaagcggtcctgaacggagaaaaaacagtgaaggaacttatggagaattaacacgaagggtttcccatctgtgtgacctgatccctttttacgtttttttgttttgttttttcttttgttcatgatcaacttgggagtgattcctcttggtgatgtcgaaaattgaactgttataccaatattctgttgcctttgtttcctgtttgtagtttactactttttacagtagtcgttgttcctgccttgcttgcgtttgtcagggtttccctttagcttagtaccaatatctagccttaattttgcttattctttctcaccgcccatgattgatttcaatcatgattaatgatttatgcatgaaaactcaaaatactcaattgtcttgtacaaggcaatcacaagctggtcagccattctcagcgcctataagagctttcagccaggccggccccaaaacgatctaccctgtggacctggctaggctaaactttggaaagtcatgcaattatgaacgtttgaagctcaagcgctcctaccctctcctggagcagtgcttgaagactgagtccgtctcagataacttcgtataatgtatgctatacgaagttatcctgcaggagctcagaccttgcatgttagccttgaccttgcctctatgaccactaattcgcacaagattgcacgttaccattgtcatcttgccatgtatccaatgtttcctgtttgccatagtacgtagtagatacatcgatcatcgatgcagatgacgcagatggcattggttcgctttgccctatgcatgcatcatgcatcatgcatcatgcgtcatgcgtcactatccatattaatcattgccctctgtactaggccatgacacctgcagacccttccccagggatgcttcttgtaatagccaatatactacacaactttaccgattacgatcgagatcgatctcactatagtttgtcgaacttcgatgcacatcgagggtgcggaaaaaagctgacggaagcggaagtgggtgaattggttaatttagttagattggcagggttgttcccaagattcaacgcaagctgagaaagaaaacagaaacacgaggcataaggccagtcagaaaatgcattacgaggggagttgaagtgactgtgggccagtgcctgggtcgtcatgtgcaaattttttcttcggttagactgccgcagcatgcagcaactctgccggccctatataactagtgcttcatcttcttgtcattcttgtctctttaccaacacaccggtactctttcaccatgggtaaggaaaagacacacgtatcgcgaccccgactcaactccaacatggacgcagacctgtacggatacaaatgggctcgagataatgtcggacagtcgggtgcgacgatctacagactctatggaaaaccggacgcccccgagctctttcttaaacacggcaagggtagcgttgcaaacgacgtaaccgacgaaatggtccgtctgaattggctaactgagttcatgccactccccaccatcaagcacttcatccgtacacctgacgatgcgtggctgttgactacggccatccccggtaagaccgcttttcaggtcctcgaggaataccctgactcgggcgagaacatcgtggatgccttggctgtgtttttgcgccgccttcactctattccggtctgcaactgccctttcaacagcgaccgtgtttttaggcttgcccaggcacaatcacgcatgaacaatggtctagtcgacgctagtgatttcgatgacgagcgcaacggctggccggtggaacaagtgtggaaagagatgcataagctcctgcccttttccccagactctgtcgtgacgcatggtgatttctcgcttgacaacctcatctttgacgagggcaagctcattggctgcattgacgtcggccgggttggcatcgccgatcgctaccaagatcttgcgatcctctggaattgtctgggcgagttctcccctagcctccagaagcgtctgttccagaaatatgggatcg

SEQ ID NO: 285 - DNA, 4249 bp, synthetic construct
  source 1..4249: mol_type = other DNA
tggcatgtaggcctgtaggggctatgcctatatgctcatgcactcatgtcgcgatgttgcgatatcgcgatggaccaaccaagcaagcgtgcagcgtgggcgcttgggccaagggtgctaagctaagtgtaagcactgaagtgctgaagtgctgaagtgctgaacgtggaacgtcaggatgacacatcctctcccttcggcttcgtccaagaaaggttggtcagccatctgagatctgagatctgaaatgaatataatgatgaattgagtcgatgagatctgactatcttgggagattgcaccaatgcgccacggtgaccagatggtcttggtcttagctggtatagtggcacctgatctgccttgacagatctcatgttcatacgttcatgcattcaatcttatcgtctagccgtctgcgatctgcccaactagacgacgacaaatgtaattgatccttgtaaccctgttgctggtcgcagcagcgcgatacgatgccgtcacagtatcggcatctctgtctcgacgacagtgagtatagtcaactatgctatctagtagccaaagtaagtctacattccgggctttgcaggggttagctatttcattagacaatacttacaaccttcgaagggcttccccagaattcaattctatattgattcaatatccacccatcggacccgctctccgtaccccctgttcgcttcgccactacaaccatgtcaagacctgagaatcgtagcaaattgccccactacggcccgagtgctgtcggctggttaaagtagaatgacttgggtagccagatcgagacgcctgacattgatacgcagacagcgcagtcagtttcaaactgacaactgacgcgtactggattgacaggactccttggccggtgccattcgaatcgcttgtagacctcttgccagcatcttgccagagaagcttgaaggctggatcgctcagcctgagctcacacttagtagctccactagtcactcaggtgctcagcctctcctcagcgcctcaagctcaagcctcagggcctcagctgcatcgagctctggtgccagtgccagtgccagtgccagtgccagtgccagtgccagtgccagtgaagagagtggtatgagccaagctatacccaaaagcaaatgatggttattgccagcttccatgcacccctggggcgaaggacaacgaacaacagacagagtttgaattattcactggcctagtactaccaatttaaatttggtggttcagcgcaggaacggcgcgagtgagcgtaagggcaaactccgcatggggcgtgacgtcagtgtccctctggctgaggcactccagcaggctctggtcaacgcatcaacgtgtgtgtgtgtctaccaagcacattgtgcgctcgctgtccgtgcgccgaaatcgcaccagtcagaacgtctataaaacccctcttgcttggagggttaccgggccgtcttttcccaacgctccggctcactcactactctacacaacaaatggtcaaggcagtcatcttcacggactttgatggcactgtcaccctggaggatagcaacgattacctcacagacacacttggattcggcaaagaggaacgcctgaaagtttttgagggcgtgcttgatggaaccaaatcttttcgtcaaggtttcatggaaatgcttgagtctatccacactccttttcctgagtgcatcaaaattcttgaaaaaaaaatccgactcgatcctggctttaaagatacctttgaatgggcgcaagagaatgatgttcctgttgtggtcgtgtcgtctggaatgaagcccattatcaaagtgctgttgactcgattggtgggtcaacactcgatccataagattgacatcgtttcgaatgaggttgaaattgaggcgcacgatgaatggaaaatcatctataaggacgaaagcccctttggtcatgacaagtcgcgctcgattgacgcatataagaaaaaatttgaatccgccctgaaacctggagatgaacgcccagtttacttttactgcggagatggtgtcagcgatctgtccgccgcaaaagaatgtgatcttctgtttgccaaacgtggaaaggacctggtgacctactgcaagcgtcaaaatgtgccctttcacgaatttgacactttcgaagacatccttgcctccatgaaacaagtcctcgccggagaaaaaactgttacggagcttatggagaattaacacgaagggtttcccatctgtgtgacctgatccctttttacgtttttttgttttgttttttcttttgttcatgatcaacttgggagtgattcctcttggtgatgtcgaaaattgaactgttataccaatattctgttgcctttgtttcctgtttgtagtttactactttttacagtagtcgttgttcctgccttgcttgcgtttgtcagggtttccctttagcttagtaccaatatctagccttaattttgcttattctttctcaccgcccatgattgatttcaatcatgattaatgatttatgcatgaaaactcaaaatactcaattgtcttgtacaaggcaatcacaagctggtcagccattctcagcgcctataagagctttcagccaggccggccccaaaacgatctaccctgtggacctggctaggctaaactttggaaagtcatgcaattatgaacgtttgaagctcaagcgctcctaccctctcctggagcagtgcttgaagactgagtccgtctcagataacttcgtataatgtatgctatacgaagttatcctgcaggagctcagaccttgcatgttagccttgaccttgcctctatgaccactaattcgcacaagattgcacgttaccattgtcatcttgccatgtatccaatgtttcctgtttgccatagtacgtagtagatacatcgatcatcgatgcagatgacgcagatggcattggttcgctttgccctatgcatgcatcatgcatcatgcatcatgcgtcatgcgtcactatccatattaatcattgccctctgtactaggccatgacacctgcagacccttccccagggatgcttcttgtaatagccaatatactacacaactttaccgattacgatcgagatcgatctcactatagtttgtcgaacttcgatgcacatcgagggtgcggaaaaaagctgacggaagcggaagtgggtgaattggttaatttagttagattggcagggttgttcccaagattcaacgcaagctgagaaagaaaacagaaacacgaggcataaggccagtcagaaaatgcattacgaggggagttgaagtgactgtgggccagtgcctgggtcgtcatgtgcaaattttttcttcggttagactgccgcagcatgcagcaactctgccggccctatataactagtgcttcatcttcttgtcattcttgtctctttaccaacacaccggtactctttcaccatgggtaaggaaaagacacacgtatcgcgaccccgactcaactccaacatggacgcagacctgtacggatacaaatgggctcgagataatgtcggacagtcgggtgcgacgatctacagactctatggaaaaccggacgcccccgagctctttcttaaacacggcaagggtagcgttgcaaacgacgtaaccgacgaaatggtccgtctgaattggctaactgagttcatgccactccccaccatcaagcacttcatccgtacacctgacgatgcgtggctgttgactacggccatccccggtaagaccgcttttcaggtcctcgaggaataccctgactcgggcgagaacatcgtggatgccttggctgtgtttttgcgccgccttcactctattccggtctgcaactgccctttcaacagcgaccgtgtttttaggcttgcccaggcacaatcacgcatgaacaatggtctagtcgacgctagtgatttcgatgacgagcgcaacggctggccggtggaacaagtgtggaaagagatgcataagctcctgcccttttccccagactctgtcgtgacgcatggtgatttctcgcttgacaacctcatctttgacgagggcaagctcattggctgcattgacgtcggccgggttggcatcgccgatcgctaccaagatcttgcgatcctctggaattgtctgggcgagttctcccctagcctccagaagcgtctgttccagaaatatgggatcg

SEQ ID NO: 286 - DNA, 4237 bp, synthetic construct
  source 1..4237: mol_type = other DNA
tggcatgtaggcctgtaggggctatgcctatatgctcatgcactcatgtcgcgatgttgcgatatcgcgatggaccaaccaagcaagcgtgcagcgtgggcgcttgggccaagggtgctaagctaagtgtaagcactgaagtgctgaagtgctgaagtgctgaacgtggaacgtcaggatgacacatcctctcccttcggcttcgtccaagaaaggttggtcagccatctgagatctgagatctgaaatgaatataatgatgaattgagtcgatgagatctgactatcttgggagattgcaccaatgcgccacggtgaccagatggtcttggtcttagctggtatagtggcacctgatctgccttgacagatctcatgttcatacgttcatgcattcaatcttatcgtctagccgtctgcgatctgcccaactagacgacgacaaatgtaattgatccttgtaaccctgttgctggtcgcagcagcgcgatacgatgccgtcacagtatcggcatctctgtctcgacgacagtgagtatagtcaactatgctatctagtagccaaagtaagtctacattccgggctttgcaggggttagctatttcattagacaatacttacaaccttcgaagggcttccccagaattcaattctatattgattcaatatccacccatcggacccgctctccgtaccccctgttcgcttcgccactacaaccatgtcaagacctgagaatcgtagcaaattgccccactacggcccgagtgctgtcggctggttaaagtagaatgacttgggtagccagatcgagacgcctgacattgatacgcagacagcgcagtcagtttcaaactgacaactgacgcgtactggattgacaggactccttggccggtgccattcgaatcgcttgtagacctcttgccagcatcttgccagagaagcttgaaggctggatcgctcagcctgagctcacacttagtagctccactagtcactcaggtgctcagcctctcctcagcgcctcaagctcaagcctcagggcctcagctgcatcgagctctggtgccagtgccagtgccagtgccagtgccagtgccagtgccagtgccagtgaagagagtggtatgagccaagctatacccaaaagcaaatgatggttattgccagcttccatgcacccctggggcgaaggacaacgaacaacagacagagtttgaattattcactggcctagtactaccaatttaaatttggtggttcagcgcaggaacggcgcgagtgagcgtaagggcaaactccgcatggggcgtgacgtcagtgtccctctggctgaggcactccagcaggctctggtcaacgcatcaacgtgtgtgtgtgtctaccaagcacattgtgcgctcgctgtccgtgcgccgaaatcgcaccagtcagaacgtctataaaacccctcttgcttggagggttaccgggccgtcttttcccaacgctccggctcactcactactctacacaacaaatggtcaacgcggttatcttcacggactttgacggtactgtgacctggcaagacagcaacgacttcctcacggataccaagggttttggtaaggaggaacgctctaaggtgttcgaaggcgtgttggacggcaccaaatcgtttcgtgacggattttgggacatgctcgagtctgtgaaaaccccattcccggaatgcgttaaacttgtggaggagaatatccaacttgacccaggctttaaagatacttttgaatgggctcaagaaaatggcgtgcccattgttgtgatcagcagcggaatgcgtcccctcattaaggctcttcttgcacgactggttggaccagaagccatcgaaaagattgacattgttagcaacgaggttgagatcgactctgacggccagtggcgtattgtctacaaggatgacagctcttttggacacgacaagtccaaatccatcaccgcctataagaaacaattcgaagctgcaggtaaaaaaccgacctatttttactgcggtgacggcgtctcggatcttagcgcggcaaaagagtgcgacctgttgttcgctaagcgcggaaaggatctggtgacctactgtaagcgcgaacacgtcccattccatgagtttgataccttcgaggacattctttcgtcgatgaaagatgttctcgcaggcaagaagacagttacagagttgatgcagaattaacacgaagggtttcccatctgtgtgacctgatccctttttacgtttttttgttttgttttttcttttgttcatgatcaacttgggagtgattcctcttggtgatgtcgaaaattgaactgttataccaatattctgttgcctttgtttcctgtttgtagtttactactttttacagtagtcgttgttcctgccttgcttgcgtttgtcagggtttccctttagcttagtaccaatatctagccttaattttgcttattctttctcaccgcccatgattgatttcaatcatgattaatgatttatgcatgaaaactcaaaatactcaattgtcttgtacaaggcaatcacaagctggtcagccattctcagcgcctataagagctttcagccaggccggccccaaaacgatctaccctgtggacctggctaggctaaactttggaaagtcatgcaattatgaacgtttgaagctcaagcgctcctaccctctcctggagcagtgcttgaagactgagtccgtctcagataacttcgtataatgtatgctatacgaagttatcctgcaggagctcagaccttgcatgttagccttgaccttgcctctatgaccactaattcgcacaagattgcacgttaccattgtcatcttgccatgtatccaatgtttcctgtttgccatagtacgtagtagatacatcgatcatcgatgcagatgacgcagatggcattggttcgctttgccctatgcatgcatcatgcatcatgcatcatgcgtcatgcgtcactatccatattaatcattgccctctgtactaggccatgacacctgcagacccttccccagggatgcttcttgtaatagccaatatactacacaactttaccgattacgatcgagatcgatctcactatagtttgtcgaacttcgatgcacatcgagggtgcggaaaaaagctgacggaagcggaagtgggtgaattggttaatttagttagattggcagggttgttcccaagattcaacgcaagctgagaaagaaaacagaaacacgaggcataaggccagtcagaaaatgcattacgaggggagttgaagtgactgtgggccagtgcctgggtcgtcatgtgcaaattttttcttcggttagactgccgcagcatgcagcaactctgccggccctatataactagtgcttcatcttcttgtcattcttgtctctttaccaacacaccggtactctttcaccatgggtaaggaaaagacacacgtatcgcgaccccgactcaactccaacatggacgcagacctgtacggatacaaatgggctcgagataatgtcggacagtcgggtgcgacgatctacagactctatggaaaaccggacgcccccgagctctttcttaaacacggcaagggtagcgttgcaaacgacgtaaccgacgaaatggtccgtctgaattggctaactgagttcatgccactccccaccatcaagcacttcatccgtacacctgacgatgcgtggctgttgactacggccatccccggtaagaccgcttttcaggtcctcgaggaataccctgactcgggcgagaacatcgtggatgccttggctgtgtttttgcgccgccttcactctattccggtctgcaactgccctttcaacagcgaccgtgtttttaggcttgcccaggcacaatcacgcatgaacaatggtctagtcgacgctagtgatttcgatgacgagcgcaacggctggccggtggaacaagtgtggaaagagatgcataagctcctgcccttttccccagactctgtcgtgacgcatggtgatttctcgcttgacaacctcatctttgacgagggcaagctcattggctgcattgacgtcggccgggttggcatcgccgatcgctaccaagatcttgcgatcctctggaattgtctgggcgagttctcccctagcctccagaagcgtctgttccagaaatatgggatcg

SEQ ID NO: 287 - DNA, 4174 bp, synthetic construct
  source 1..4174: mol_type = other DNA
tggcatgtaggcctgtaggggctatgcctatatgctcatgcactcatgtcgcgatgttgcgatatcgcgatggaccaaccaagcaagcgtgcagcgtgggcgcttgggccaagggtgctaagctaagtgtaagcactgaagtgctgaagtgctgaagtgctgaacgtggaacgtcaggatgacacatcctctcccttcggcttcgtccaagaaaggttggtcagccatctgagatctgagatctgaaatgaatataatgatgaattgagtcgatgagatctgactatcttgggagattgcaccaatgcgccacggtgaccagatggtcttggtcttagctggtatagtggcacctgatctgccttgacagatctcatgttcatacgttcatgcattcaatcttatcgtctagccgtctgcgatctgcccaactagacgacgacaaatgtaattgatccttgtaaccctgttgctggtcgcagcagcgcgatacgatgccgtcacagtatcggcatctctgtctcgacgacagtgagtatagtcaactatgctatctagtagccaaagtaagtctacattccgggctttgcaggggttagctatttcattagacaatacttacaaccttcgaagggcttccccagaattcaattctatattgattcaatatccacccatcggacccgctctccgtaccccctgttcgcttcgccactacaaccatgtcaagacctgagaatcgtagcaaattgccccactacggcccgagtgctgtcggctggttaaagtagaatgacttgggtagccagatcgagacgcctgacattgatacgcagacagcgcagtcagtttcaaactgacaactgacgcgtactggattgacaggactccttggccggtgccattcgaatcgcttgtagacctcttgccagcatcttgccagagaagcttgaaggctggatcgctcagcctgagctcacacttagtagctccactagtcactcaggtgctcagcctctcctcagcgcctcaagctcaagcctcagggcctcagctgcatcgagctctggtgccagtgccagtgccagtgccagtgccagtgccagtgccagtgccagtgaagagagtggtatgagccaagctatacccaaaagcaaatgatggttattgccagcttccatgcacccctggggcgaaggacaacgaacaacagacagagtttgaattattcactggcctagtactaccaatttaaatttggtggttcagcgcaggaacggcgcgagtgagcgtaagggcaaactccgcatggggcgtgacgtcagtgtccctctggctgaggcactccagcaggctctggtcaacgcatcaacgtgtgtgtgtgtctaccaagcacattgtgcgctcgctgtccgtgcgccgaaatcgcaccagtcagaacgtctataaaacccctcttgcttggagggttaccgggccgtcttttcccaacgctccggctcactcactactctacacaacaaatgcgctgtaaaggctttcttttcgacttggacggtacgttggtcgactcgctgcccgcagtcgagcgagcgtggtctaattgggctcgacgacatggacttgcgcccgaagaagtcctcgcatttattcatggaaaacaggctattacgtcgttgcgtcactttatggcaggaaagtccgaagcggacatcgctgccgaatttacccgcttggagcacatcgaggcaactgagactgaaggtattactgcgttgccaggcgctattgcactgctttcccatctcaataaggctggcattccatgggccatcgttacttctggttcgatgcctgtggcccgcgcccgccataagatcgctggactgcccgcaccagaggttttcgttacggccgaacgagtcaaacgcggtaagcccgagcccgatgcctatctcctcggtgcacaattgcttggcttggcgccacaggagtgtgtggtggtcgaggatgcacccgcgggtgtcctctctggactggccgctggttgccacgtcatcgcagtgaacgcaccagcggatacaccccgcctgaatgaagttgatttggtgctccattccctggaacagatcacagtcacgaagcagcctaatggcgacgtgattattcaataacacgaagggtttcccatctgtgtgacctgatccctttttacgtttttttgttttgttttttcttttgttcatgatcaacttgggagtgattcctcttggtgatgtcgaaaattgaactgttataccaatattctgttgcctttgtttcctgtttgtagtttactactttttacagtagtcgttgttcctgccttgcttgcgtttgtcagggtttccctttagcttagtaccaatatctagccttaattttgcttattctttctcaccgcccatgattgatttcaatcatgattaatgatttatgcatgaaaactcaaaatactcaattgtcttgtacaaggcaatcacaagctggtcagccattctcagcgcctataagagctttcagccaggccggccccaaaacgatctaccctgtggacctggctaggctaaactttggaaagtcatgcaattatgaacgtttgaagctcaagcgctcctaccctctcctggagcagtgcttgaagactgagtccgtctcagataacttcgtataatgtatgctatacgaagttatcctgcaggagctcagaccttgcatgttagccttgaccttgcctctatgaccactaattcgcacaagattgcacgttaccattgtcatcttgccatgtatccaatgtttcctgtttgccatagtacgtagtagatacatcgatcatcgatgcagatgacgcagatggcattggttcgctttgccctatgcatgcatcatgcatcatgcatcatgcgtcatgcgtcactatccatattaatcattgccctctgtactaggccatgacacctgcagacccttccccagggatgcttcttgtaatagccaatatactacacaactttaccgattacgatcgagatcgatctcactatagtttgtcgaacttcgatgcacatcgagggtgcggaaaaaagctgacggaagcggaagtgggtgaattggttaatttagttagattggcagggttgttcccaagattcaacgcaagctgagaaagaaaacagaaacacgaggcataaggccagtcagaaaatgcattacgaggggagttgaagtgactgtgggccagtgcctgggtcgtcatgtgcaaattttttcttcggttagactgccgcagcatgcagcaactctgccggccctatataactagtgcttcatcttcttgtcattcttgtctctttaccaacacaccggtactctttcaccatgggtaaggaaaagacacacgtatcgcgaccccgactcaactccaacatggacgcagacctgtacggatacaaatgggctcgagataatgtcggacagtcgggtgcgacgatctacagactctatggaaaaccggacgcccccgagctctttcttaaacacggcaagggtagcgttgcaaacgacgtaaccgacgaaatggtccgtctgaattggctaactgagttcatgccactccccaccatcaagcacttcatccgtacacctgacgatgcgtggctgttgactacggccatccccggtaagaccgcttttcaggtcctcgaggaataccctgactcgggcgagaacatcgtggatgccttggctgtgtttttgcgccgccttcactctattccggtctgcaactgccctttcaacagcgaccgtgtttttaggcttgcccaggcacaatcacgcatgaacaatggtctagtcgacgctagtgatttcgatgacgagcgcaacggctggccggtggaacaagtgtggaaagagatgcataagctcctgcccttttccccagactctgtcgtgacgcatggtgatttctcgcttgacaacctcatctttgacgagggcaagctcattggctgcattgacgtcggccgggttggcatcgccgatcgctaccaagatcttgcgatcctctggaattgtctgggcgagttctcccctagcctccagaagcgtctgttccagaaatatgggatcg

SEQ ID NO: 288 - DNA, 8167 bp, synthetic construct
  source 1..8167: mol_type = other DNA
accgcctctccccgcgcgttggccgattcattaatgcagctggcacgacaggtttcccgactggaaagcgggcagtgagcgcaacgcaattaatgtgagttagctcactcattaggcaccccaggctttacactttatgcttccggctcgtatgttgtgtggaattgtgagcggataacaatttcacacaggaaacagctatgaccatgattacgccaagctatttaggtgacactatagaatactcaagctatgcatcaagcttggtaccgagctcggatccactagtcctgcaggtatcagatctcagatctcagagagatgtcagagcagacctcgcccttacaaagacacttgtacaaaagttttcaggcatacggattccttcccttcctcgcagaaactctctatcgcccctttgcacttgccgccgtttggtattggacaattgattgctagcaccccttgcaatgatgttatacaaatttatctactgaattgcttgagagtcagtaacaccacggcttccgcgcgagattccatcaccaggcggtggtcacacagatgagttcatcaacgggattctgtcaagtatctcgcatcaacaaatttagctaacaagtctgaacacgttctattcaaattcagaagccacaagaagataactttagtaggaaaagtagattgcaagcacactccgaggcttgctctcgggcgaagaagggatattttgggctcagagcgccatcagaacgacggacgctccaacaaaggggaagcaacagtggtgaacaccattaggggcagggcatagacatgtatagcgcttgctccccgtcagaagcagtaccgtcatacaatgccgtgtcgaggccacacaaggtgaaacccattcggcgataagcgtgaatagcaggagcatttacattggtaacttcaagccataagtgacccgccccacgctctcgagcgaattccgtagctagacccatcagtgctcgtcccacgccatgaccacgatgttctggcgcgacttcgatatcttcgacggtcaatctacggttccaccccgagtaggacacaacaacaaatccggccaggtcaccatcatcaccgtatgcgacgaaagtgcgcgagtcaggatcaccatcttcgccatcatcgctctcgtcatcactctcatcatctggaaatactttcgtcaatggcggatctacaggcacttcacggagagtaaatccgtcaccagtagctgtcacgcgaaaaactgtgtctgtggtgaatgatccatcaagggcttcaattgcttctgcatcgcccggtactgatgtcctataacggtaggcggtatcatctaaagtcgttcccatggtgaaagagtaccggtgtgttggtaaagagacaagaatgacaagaagatgaagcactagttatatagggccggcagagttgctgcatgctgcggcagtctaaccgaagaaaaaatttgcacatgacgacccaggcactggcccacagtcacttcaactcccctcgtaatgcattttctgactggccttatgcctcgtgtttctgttttctttctcagcttgcgttgaatcttgggaacaaccctgccaatctaactaaattaaccaattcacccacttccgcttccgtcagcttttttccgcaccctcgatgtgcatcgaagttcgacaaactatagtgagatcgatctcgatcgtaatcggtaaagttgtgtagtatattggctattacaagaagcatccctggggaagggtctgcaggtgtcatggcctagtacagagggcaatgattaatatggatagtgacgcatgatgcatgatgcatgatgcatgatggatgcatagggcaaagcgaaccaatgccatctgcgtcatctgcatcgatgatcgatgtatctactacgtactatggcaaacaggaaacattggatacatggcaagatgacaatggtaacgtgcaatcttgtgcgaattagtggtcatagaggcaaggtcaaggctaacatgcaaggtctgagctcctgcaggactagtaacggccgccagtgtggcgcgccattgtcattcgtgattctagtactgtgggtggctgcgaaactccttcactcaatgaattacaatcatgattcgtgattcgcaccgatcccaccagcctctcgagaaaagcggacttgaacattcatgattcacgaccctgtgattcatgaatgccatccgatccagaacggacttgctactcacgactcagactgaatttttaaatgccctcatgatttgattcatgatcagcaatgccctcatgatttgattcatgattcgctgatcacagcggtgaagaacgtaacccattcacgattcagaaggcaagtactgcttcttgctcggctgctttgttgctgccgaggcgggctagcttgcacaaagatcgaggatcggtaatggcgcgccaggcggccgctcgacgacagtgagtatagtcaactatgctatctagtagccaaagtaagtctacattccgggctttgcaggggttagctatttcattagacaatacttacaaccttcgaagggcttccccagaattcaattctatattgattcaatatccacccatcggacccgctctccgtaccccctgttcgcttcgccactacaaccatgtcaagacctgagaatcgtagcaaattgccccactacggcccgagtgctgtcggctggttaaagtagaatgacttgggtagccagatcgagacgcctgacattgatacgcagacagcgcagtcagtttcaaactgacaactgacgcgtactggattgacaggactccttggccggtgccattcgaatcgcttgtagacctcttgccagcatcttgccagagaagcttgaaggctggatcgctcagcctgagctcacacttagtagctccactagtcactcaggtgctcagcctctcctcagcgcctcaagctcaagcctcagggcctcagctgcatcgagctctggtgccagtgccagtgccagtgccagtgccagtgccagtgccagtgccagtgaagagagtggtatgagccaagctatacccaaaagcaaatgatggttattgccagcttccatgcacccctggggcgaaggacaacgaacaacagacagagtttgaattattcactggcctagtactaccaatttaaatttggtggttcagcgcaggaacggcgcgagtgagcgtaagggcaaactccgcatggggcgtgacgtcagtgtccctctggctgaggcactccagcaggctctggtcaacgcatcaacgtgtgtgtgtgtctaccaagcacattgtgcgctcgctgtccgtgcgccgaaatcgcaccagtcagaacgtctataaaacccctcttgcttggagggttaccgggccgtcttttcccaacgctccggctcactcactactctacacaacaatgtccaacttgctcaccgtccaccagaacctcccggccctgccagtggacgcgaccagcgatgaagttcgaaaaaatcttatggatatgttccgcgatcgacaagccttttccgaacatacctggaagatgctgttgagcgtgtgccgatcgtgggccgcttggtgcaaactgaacaaccgcaagtggtttcccgccgagccggaagatgttcgtgattacctgctctacctgcaagcacgtggtttggcggtgaagactatccaacagcacctgggtcaacttaatatgcttcaccgccgatctggactcccacgtccctctgactccaacgctgtgtcccttgttatgcgtcgtattcgcaaagaaaacgtggacgctggcgaacgagcgaaacaggctttggcatttgaacgaactgacttcgatcaggtccgctccttgatggaaaactctgaccgttgccaagacatccgtaacctcgcgttcctgggaatcgcctacaataccctcctccgtatcgctgaaattgctcgcattcgagtgaaggacatttctcgaacagacggcggccgtatgcttattcatatcggtcgtactaaaacactcgtcagcactgctggagtcgagaaagcgctctctcttggagttactaaattggtggaacgatggatttctgtttctggagttgcggatgatcctaataactacttgttttgtcgtgttcgtaagaacggcgtcgccgcgccctccgccacatcccagctctccacacgtgcactcgagggaatcttcgaggcgactcaccgtctgatttacggcgctaaagacgatagcggtcaacgataccttgcctggtctggtcactccgcacgagtgggcgcagcccgcgacatggcgcgtgcaggagtgtccattccagaaatcatgcaagcgggcggatggacgaacgtcaacatcgtgatgaattatattcgtaacttggactcggaaaccggagcaatggtccgacttctcgaggatggcgattaagttgctccctttgctgttctatgatccaaaagatgcttagtgctccactctctactcccgactaccttttacgcattctgacatgactagtagtgcaatgttacccctggtgttttctcgcaatcactttctgtctgctatagcttttgatcgtcagtagttttttggtatagctaaagtagacttttgtacctggcgttcaatgtaattttactccttttttgtgcgatgcaacagatggtgtaaagatcgtcgttaaagttttggcttgatgcttgattcggtgacggttgcttgggtgatccttatatcgtctcctggtgttctcataagcccaggctcttcttagctatgtacaacaggtccaccactgactatgttatgtagaggcatgcatttaacttacggaaagatttaatggagaagaacgtacctagtcagatgcttgacatgaaaacgtattcctgcaattcacaaatcagtatcctgcctgtccactctctagagggcccaattcgccctatagtgagtcgtattacaattcactggccgtcgttttacaacgtcgtgactgggaaaaccctggcgttacccaacttaatcgccttgcagcacatccccctttcgccagctggcgtaatagcgaagaggcccgcaccgatcgcccttcccaacagttgcgcagcctatacgtacggcagtttaaggtttacacctataaaagagagagccgttatcgtctgtttgtggatgtacagagtgatattattgacacgccggggcgacggatggtgatccccctggccagtgcacgtctgctgtcagataaagtctcccgtgaactttacccggtggtgcatatcggggatgaaagctggcgcatgatgaccaccgatatggccagtgtgccggtctccgttatcggggaagaagtggctgatctcagccaccgcgaaaatgacatcaaaaacgccattaacctgatgttctggggaatataaatgtcaggcatgagattatcaaaaaggatcttcacctagatccttttcacgtagaaagccagtccgcagaaacggtgctgaccccggatgaatgtcagctactgggctatctggacaagggaaaacgcaagcgcaaagagaaagcaggtagcttgcagtgggcttacatggcgatagctagactgggcggttttatggacagcaagcgaaccggaattgccagctggggcgccctctggtaaggttgggaagccctgcaaagtaaactggatggctttctcgccgccaaggatctgatggcgcaggggatcaagctctgatcaagagacaggatgaggatcgtttcgcatgattgaacaagatggattgcacgcaggttctccggccgcttgggtggagaggctattcggctatgactgggcacaacagacaatcggctgctctgatgccgccgtgttccggctgtcagcgcaggggcgcccggttctttttgtcaagaccgacctgtccggtgccctgaatgaactgcaagacgaggcagcgcggctatcgtggctggccacgacgggcgttccttgcgcagctgtgctcgacgttgtcactgaagcgggaagggactggctgctattgggcgaagtgccggggcaggatctcctgtcatctcaccttgctcctgccgagaaagtatccatcatggctgatgcaatgcggcggctgcatacgcttgatccggctacctgcccattcgaccaccaagcgaaacatcgcatcgagcgagcacgtactcggatggaagccggtcttgtcgatcaggatgatctggacgaagagcatcaggggctcgcgccagccgaactgttcgccaggctcaaggcgagcatgcccgacggcgaggatctcgtcgtgacccatggcgatgcctgcttgccgaatatcatggtggaaaatggccgcttttctggattcatcgactgtggccggctgggtgtggcggaccgctatcaggacatagcgttggctacccgtgatattgctgaagagcttggcggcgaatgggctgaccgcttcctcgtgctttacggtatcgccgctcccgattcgcagcgcatcgccttctatcgccttcttgacgagttcttctgaattattaacgcttacaatttcctgatgcggtattttctccttacgcatctgtgcggtatttcacaccgcatacaggtggcacttttcggggaaatgtgcgcggaacccctatttgtttatttttctaaatacattcaaatatgtatccgctcatgagacaataaccctgataaatgcttcaataatagcacgtgaggagggccaccatggccaagttgaccagtgccgttccggtgctcaccgcgcgcgacgtcgccggagcggtcgagttctggaccgaccggctcgggttctcccgggacttcgtggaggacgacttcgccggtgtggtccgggacgacgtgaccctgttcatcagcgcggtccaggaccaggtggtgccggacaacaccctggcctgggtgtgggtgcgcggcctggacgagctgtacgccgagtggtcggaggtcgtgtccacgaacttccgggacgcctccgggccggccatgaccgagatcggcgagcagccgtgggggcgggagttcgccctgcgcgacccggccggcaactgcgtgcacttcgtggccgaggagcaggactgacacgtgctaaaacttcatttttaatttaaaaggatctaggtgaagatcctttttgataatctcatgaccaaaatcccttaacgtgagttttcgttccactgagcgtcagaccccgtagaaaagatcaaaggatcttcttgagatcctttttttctgcgcgtaatctgctgcttgcaaacaaaaaaaccaccgctaccagcggtggtttgtttgccggatcaagagctaccaactctttttccgaaggtaactggcttcagcagagcgcagataccaaatactgtccttctagtgtagccgtagttaggccaccacttcaagaactctgtagcaccgcctacatacctcgctctgctaatcctgttaccagtggctgctgccagtggcgataagtcgtgtcttaccgggttggactcaagacgatagttaccggataaggcgcagcggtcgggctgaacggggggttcgtgcacacagcccagcttggagcgaacgacctacaccgaactgagatacctacagcgtgagctatgagaaagcgccacgcttcccgaagggagaaaggcggacaggtatccggtaagcggcagggtcggaacaggagagcgcacgagggagcttccagggggaaacgcctggtatctttatagtcctgtcgggtttcgccacctctgacttgagcgtcgatttttgtgatgctcgtcaggggggcggagcctatggaaaaacgccagcaacgcggcctttttacggttcctgggcttttgctggccttttgctcacatgttctttcctgcgttatcccctgattctgtggataaccgtattaccgcctttgagtgagctgataccgctcgccgcagccgaacgaccgagcgcagcgagtcagtgagcgaggaagcggaagagcgcccaatacgcaa

SEQ ID NO: 289 - DNA, 500 bp, Moniliella pollinis
  source 1..500: mol_type = other DNA
tatcagatctcagatctcagagagatgtcagagcagacctcgcccttacaaagacacttgtacaaaagttttcaggcatacggattccttcccttcctcgcagaaactctctatcgcccctttgcacttgccgccgtttggtattggacaattgattgctagcaccccttgcaatgatgttatacaaatttatctactgaattgcttgagagtcagtaacaccacggcttccgcgcgagattccatcaccaggcggtggtcacacagatgagttcatcaacgggattctgtcaagtatctcgcatcaacaaatttagctaacaagtctgaacacgttctattcaaattcagaagccacaagaagataactttagtaggaaaagtagattgcaagcacactccgaggcttgctctcgggcgaagaagggatattttgggctcagagcgccatcagaacgacggacgctccaacaaaggggaagcaacagtggtgaacacca

SEQ ID NO: 290 - DNA, 1106 bp, Moniliella pollinis
  source 1..1106: mol_type = genomic DNA
atgaccgacacaattgacgttgctgctttccaagcacacaaggctttccaaggcgaccaggagtcgtaccgtaagggctcgaaccgtcctggtttgcttgatggtgagcgtcgtcgctcatcggtctctgatgccaagatcaagctcaactcgggtcactacattcccgtcgtcgcgcttggtgtgtacaaggcacctaacgattcgactaccgaggatgccgtcaagtgggcttttgaggctggataccgtcatgttgattcgggtatgttacggttctctcccttgacctcttgatctctttgatctggtagctgaccattcatgaattgcaatctccagctgctcgatacgccaatgaggaagctgttggccgtgcattgaatgactttgtcaagactaccggtgtcccccgcgaggaaatctttgttacgtctaagctttgggacgcagaccacgaacgtgctgacgctgcgattgatgaatccttgcaaaagctcggtttgacgtacatggacttgtacctgttgcattcgcccggtgctgaccgtgacactcggttgaaggcttggaaagctatggaagatgctgtgtacgctggtaagatcaagtccattggtgtttccaactttgatgtagaagagttggatgacttgttggccaactgccgtattaagcctgctgtcaatcaaattgaatcgcatccattcttccaacatgaagatttgcgcaaagctaccattgaacgtggtattcacgtacaagcatattcgcctatggcacaaggtgctgcattggaacgtcctgagattgttgctattgccaagaagcacggtaagagtactgcacaaattttgctcaagtggggtatcaacattggtaacattgtgttacctaagagtttgactcgatcgcgtattgaagccaatgcagacttgtttgactttgaattggatcaagatgatatggatgtactgaacaatttggatgaaggtatgaagatgggcaaattgggtcctgctggtactagtgctcctggatcgcgtcgtacatctagtaactcgggtggcttgtctggtggtaaattacaaatgagttccaagtaa

SEQ ID NO: 291 - DNA, 1026 bp, Moniliella pollinis
  source 1..1026: mol_type = other DNA
atgaccgacacaattgacgttgctgctttccaagcacacaaggctttccaaggcgaccaggagtcgtaccgtaagggctcgaaccgtcctggtttgcttgatggtgagcgtcgtcgctcatcggtctctgatgccaagatcaagctcaactcgggtcactacattcccgtcgtcgcgcttggtgtgtacaaggcacctaacgattcgactaccgaggatgccgtcaagtgggcttttgaggctggataccgtcatgttgattcggctgctcgatacgccaatgaggaagctgttggccgtgcattgaatgactttgtcaagactaccggtgtcccccgcgaggaaatctttgttacgtctaagctttgggacgcagaccacgaacgtgctgacgctgcgattgatgaatccttgcaaaagctcggtttgacgtacatggacttgtacctgttgcattcgcccggtgctgaccgtgacactcggttgaaggcttggaaagctatggaagatgctgtgtacgctggtaagatcaagtccattggtgtttccaactttgatgtagaagagttggatgacttgttggccaactgccgtattaagcctgctgtcaatcaaattgaatcgcatccattcttccaacatgaagatttgcgcaaagctaccattgaacgtggtattcacgtacaagcatattcgcctatggcacaaggtgctgcattggaacgtcctgagattgttgctattgccaagaagcacggtaagagtactgcacaaattttgctcaagtggggtatcaacattggtaacattgtgttacctaagagtttgactcgatcgcgtattgaagccaatgcagacttgtttgactttgaattggatcaagatgatatggatgtactgaacaatttggatgaaggtatgaagatgggcaaattgggtcctgctggtactagtgctcctggatcgcgtcgtacatctagtaactcgggtggcttgtctggtggtaaattacaaatgagttccaag

SEQ ID NO: 292 - protein, 342 aa, Moniliella pollinis
MTDTIDVAAFQAHKAFQGDQESYRKGSNRPGLLDGERRRSSVSDAKIKLNSGHYIPVVALGVYKAPNDSTTEDAVKWAFEAGYRHVDSAARYANEEAVGRALNDFVKTTGVPREEIFVTSKLWDADHERADAAIDESLQKLGLTYMDLYLLHSPGADRDTRLKAWKAMEDAVYAGKIKSIGVSNFDVEELDDLLANCRIKPAVNQIESHPFFQHEDLRKATIERGIHVQAYSPMAQGAALERPEIVAIAKKHGKSTAQILLKWGINIGNIVLPKSLTRSRIEANADLFDFELDQDDMDVLNNLDEGMKMGKLGPAGTSAPGSRRTSSNSGGLSGGKLQMSSK

SEQ ID NO: 293 - DNA, 1079 bp, Moniliella pollinis
  source 1..1079: mol_type = genomic DNA
atggcttcttatcacgagtacgtccattcctatttctgatcgagcctttgtcagtttggaaaatctccagaattcctaaccttggttgtttcccatttgctcttgctgccttcagacccgttaaagaatttaccttggctgacggtaacaagattccttccattggattgggaacttggcaatcagctcctggtgaagtcgctgctgctgttgctcatgcaatcaaatctggttaccgtcacattgatgccgcttgggtctatggtaacgaacatgaagttggtcaaggaattaaagattctggtgttccccgtgatcaaatctttgtaacgtccaaatgttttgaaattcatcattctaatcctgaagctgcgttaaaagatacgttaaccaatttaggtttggagtatttggatttgtatttgatgcattggcccttagcgtacgaaccagttcctacgagcgatggatcgttacctaaagaagttaagaaggtggatggcaaacctgttttggataagattcaaaccgaagatgttgtaccatgctggcaaaaaatgcaacaattggttaagcagggattaaccaaaagcattggaatttccaactttaacattcggaagactcgtcacttgttacaacatgctgaaattaaacctgttgtgaaccaaatcgaagtcaactttggtaatcctcaaccggatttgattcaatggttacaacgtcatcagattgtggtcgaagcgtattccccacttggttccaccggagccaaatacaatgattctcctgtatttggagaagtagctagcaaacggaatgtgagccctgctaccgtaaccatctcttggttattacaacgtggtttggtcgttttacccaagagtgttactccttctcgtattgagagtaactttaactttattacgttgaccaaagatgaatttgaagcgattgaaaaagctgcttgttctcatcctggttctcgcgtttgtgaccaaagtgaattggccagctacgatatctttgaagataagcaccctgaatacaatgatcaagctcaagcgaaattggattaa

SEQ ID NO: 294 - DNA, 978 bp, Moniliella pollinis
  source 1..978: mol_type = other DNA
atggcttcttatcacgaacccgttaaagaatttaccttggctgacggtaacaagattccttccattggattgggaacttggcaatcagctcctggtgaagtcgctgctgctgttgctcatgcaatcaaatctggttaccgtcacattgatgccgcttgggtctatggtaacgaacatgaagttggtcaaggaattaaagattctggtgttccccgtgatcaaatctttgtaacgtccaaatgttttgaaattcatcattctaatcctgaagctgcgttaaaagatacgttaaccaatttaggtttggagtatttggatttgtatttgatgcattggcccttagcgtacgaaccagttcctacgagcgatggatcgttacctaaagaagttaagaaggtggatggcaaacctgttttggataagattcaaaccgaagatgttgtaccatgctggcaaaaaatgcaacaattggttaagcagggattaaccaaaagcattggaatttccaactttaacattcggaagactcgtcacttgttacaacatgctgaaattaaacctgttgtgaaccaaatcgaagtcaactttggtaatcctcaaccggatttgattcaatggttacaacgtcatcagattgtggtcgaagcgtattccccacttggttccaccggagccaaatacaatgattctcctgtatttggagaagtagctagcaaacggaatgtgagccctgctaccgtaaccatctcttggttattacaacgtggtttggtcgttttacccaagagtgttactccttctcgtattgagagtaactttaactttattacgttgaccaaagatgaatttgaagcgattgaaaaagctgcttgttctcatcctggttctcgcgtttgtgaccaaagtgaattggccagctacgatatctttgaagataagcaccctgaatacaatgatcaagctcaagcgaaattggat

SEQ ID NO: 295 - protein, 326 aa, Moniliella pollinis
MASYHEPVKEFTLADGNKIPSIGLGTWQSAPGEVAAAVAHAIKSGYRHIDAAWVYGNEHEVGQGIKDSGVPRDQIFVTSKCFEIHHSNPEAALKDTLTNLGLEYLDLYLMHWPLAYEPVPTSDGSLPKEVKKVDGKPVLDKIQTEDVVPCWQKMQQLVKQGLTKSIGISNFNIRKTRHLLQHAEIKPVVNQIEVNFGNPQPDLIQWLQRHQIVVEAYSPLGSTGAKYNDSPVFGEVASKRNVSPATVTISWLLQRGLVVLPKSVTPSRIESNFNFITLTKDEFEAIEKAACSHPGSRVCDQSELASYDIFEDKHPEYNDQAQAKLD

SEQ ID NO: 296 - DNA, 1122 bp, Moniliella pollinis
  source 1..1122: mol_type = genomic DNA
atggcagctgataccattgacgttgctgctttccaagcgcaaaaagaatttcaaaatcaacaaggatcttatcgtaaagcagaaaatcaccctggattgctcgatggtgaacgtcgtcgttcatccgtaagtgaggccaaagtgaagctcaactcgggtcattacattcccatggtagcactcggtgtgtacaaggcaccaaatgactcatctactgaggaaacgatcaaatgggcgtttgaatctgggtaccgtcatgttgattcaggtacgtttcctaatcgctttcctttgatctttttcatctaacaaggaagaagacttgaaagtactgactttgaaattatcctgttgacagctgcaaggtacgctaatgaagaagctgtcggtcgtgctgtaaatgattttgtcaagactgccggcgtaccacgggaagaaatcttcgttacgaccaaattatgggatgaagatcatcatcgggccactgaagcaattgatgaatccttcaataagcttaatacgggatacattgatttgtatttacttcattcccctggtcctgatcgagatatgcgtcttcaagcttggaaagctatggaagatgctgtatacgcaggaaaaatcaaatcaattggtgtttccaactttgatgtggatcaattggatgatcttttggctcatgcacgaattaaacctgctgtgaaccaaattgaatctcatcctttcttccaacatgaagatttacgtcgagctactgctgaacgtggaattcatgtagaggcatactctcctatggcgaaaggagctgcattggaacgtcctgaaattgtcaacattgctaagaaacatggtaagagtactgcacaagtattactcaagtggggtatgcaagttggtaatatcattttgcctaaaagtttgaacaaatctcgaatcccatccaatgccgatctgttcgactttgaattggatcaagatgatatggatgtattgaacaatctggatgaaggtatgaaaacgggtaaattgggtcctttgggtactagtgctccaggatcacgtcgtacatcgtccaacagtggtggagccagtggtgctaaactccaaatgagttctacgtaa

SEQ ID NO: 297 - DNA, 1029 bp, Moniliella pollinis
  source 1..1029: mol_type = other DNA
atggcagctgataccattgacgttgctgctttccaagcgcaaaaagaatttcaaaatcaacaaggatcttatcgtaaagcagaaaatcaccctggattgctcgatggtgaacgtcgtcgttcatccgtaagtgaggccaaagtgaagctcaactcgggtcattacattcccatggtagcactcggtgtgtacaaggcaccaaatgactcatctactgaggaaacgatcaaatgggcgtttgaatctgggtaccgtcatgttgattcagctgcaaggtacgctaatgaagaagctgtcggtcgtgctgtaaatgattttgtcaagactgccggcgtaccacgggaagaaatcttcgttacgaccaaattatgggatgaagatcatcatcgggccactgaagcaattgatgaatccttcaataagcttaatacgggatacattgatttgtatttacttcattcccctggtcctgatcgagatatgcgtcttcaagcttggaaagctatggaagatgctgtatacgcaggaaaaatcaaatcaattggtgtttccaactttgatgtggatcaattggatgatcttttggctcatgcacgaattaaacctgctgtgaaccaaattgaatctcatcctttcttccaacatgaagatttacgtcgagctactgctgaacgtggaattcatgtagaggcatactctcctatggcgaaaggagctgcattggaacgtcctgaaattgtcaacattgctaagaaacatggtaagagtactgcacaagtattactcaagtggggtatgcaagttggtaatatcattttgcctaaaagtttgaacaaatctcgaatcccatccaatgccgatctgttcgactttgaattggatcaagatgatatggatgtattgaacaatctggatgaaggtatgaaaacgggtaaattgggtcctttgggtactagtgctccaggatcacgtcgtacatcgtccaacagtggtggagccagtggtgctaaactccaaatgagttctacg

SEQ ID NO: 298 - protein, 343 aa, Moniliella pollinis
MAADTIDVAAFQAQKEFQNQQGSYRKAENHPGLLDGERRRSSVSEAKVKLNSGHYIPMVALGVYKAPNDSSTEETIKWAFESGYRHVDSAARYANEEAVGRAVNDFVKTAGVPREEIFVTTKLWDEDHHRATEAIDESFNKLNTGYIDLYLLHSPGPDRDMRLQAWKAMEDAVYAGKIKSIGVSNFDVDQLDDLLAHARIKPAVNQIESHPFFQHEDLRRATAERGIHVEAYSPMAKGAALERPEIVNIAKKHGKSTAQVLLKWGMQVGNIILPKSLNKSRIPSNADLFDFELDQDDMDVLNNLDEGMKTGKLGPLGTSAPGSRRTSSNSGGASGAKLQMSST

SEQ ID NO: 299 - DNA, 3881 bp, synthetic construct
  source 1..3881: mol_type = other DNA
gcctcctgctcgatacgtcgatacgtcgatgctggatgagtacatgggtacatgggtacatgggtactggatggtcgatggtcttctgtctggctcggcactgcctgactgggcaacgacgacgacgacgacgacgacgacgacgaccactggagccgtgctgcgatcgtcctaatgatcggggtggcaaggcacaccgtgcctgtgcctgacccacctgtgcacgacgtcatgggtcgcctgcctactagggtgtccgtcgcaggtcgcttagatgggaagcgggacgtgggacccctcgaccctcgattagctgcgcggccaccggccaccggccacttgcgtcaatgcgtcaatgcgtcaatgcgtcaacacggacctggtgcgttgacgcgctgacgtctaggcgcccaccggccaccacccaccagtacgcaatccagacccaggcagctccaagcttggggggttgggcagtacgccgtacggcgcggtcacagatctgagatctgcgacgctggcacggtgtccgcatcgcacgcgtcctaacacactgactgtatactgtatcctgtacccagcacccgatatccaatgcccagtactcagtgtacccaatgtactcactcagtgtacttactccgtactggctgcctgcggcctggcagacgggcgcctcagctcaaaccagcgcgatgcccagcccaacccattccattccatcccagtccagtctccagtccagtcgagccctgccctgccctgccctgccctgccctgcccggcacaccccaatcatctagcttagcgcccgcccacatatgccaacccccgagcgaggctcaatgttcgattctcgatgcgtgacgatgcttcgttacgctcggtcctccgcagccaggggttatataagtacgctcggtccgcttggtccgacatggtttgctcctaccaccatccgatccgtctactagctaccatcgtattctacccttctactgcactactgacagtcaaacaccttataacttcgtataatgtatgctatacgaagttatcctgcaggagctcagaccttgcatgttagccttgaccttgcctctatgaccactaattcgcacaagattgcacgttaccattgtcatcttgccatgtatccaatgtttcctgtttgccatagtacgtagtagatacatcgatcatcgatgcagatgacgcagatggcattggttcgctttgccctatgcatccatcatgcatcatgcatcatgcatcatgcgtcactatccatattaatcattgccctctgtactaggccatgacacctgcagacccttccccagggatgcttcttgtaatagccaatatactacacaactttaccgattacgatcgagatcgatctcactatagtttgtcgaacttcgatgcacatcgagggtgcggaaaaaagctgacggaagcggaagtgggtgaattggttaatttagttagattggcagggttgttcccaagattcaacgcaagctgagaaagaaaacagaaacacgaggcataaggccagtcagaaaatgcattacgaggggagttgaagtgactgtgggccagtgcctgggtcgtcatgtgcaaattttttcttcggttagactgccgcagcatgcagcaactctgccggccctatataactagtgcttcatcttcttgtcattcttgtctctttaccaacacaccggtactctttcaccatgggaacgactttagatgataccgcctaccgttataggacatcagtaccgggcgatgcagaagcaattgaagcccttgatggatcattcaccacagacacagtttttcgcgtgacagctactggtgacggatttactctccgtgaagtgcctgtagatccgccattgacgaaagtatttccagatgatgagagtgatgacgagagcgatgatggcgaagatggtgatcctgactcgcgcactttcgtcgcatacggtgatgatggtgacctggccggatttgttgttgtgtcctactcggggtggaaccgtagattgaccgtcgaagatatcgaagtcgcgccagaacatcgtggtcatggcgtgggacgagcactgatgggtctagctacggaattcgctcgagagcgtggggcgggtcacttatggcttgaagttaccaatgtaaatgctcctgctattcacgcttatcgccgaatgggtttcaccttgtgtggcctcgacacggcattgtatgacggtactgcttctgacggggagcaagcgctatacatgtctatgccctgcccctaatggtgttcaccactgttgcttcccctttgttggagcgtccgtcgttctgatggcgctctgagcccaaaatatcccttcttcgcccgagagcaagcctcggagtgtgcttgcaatctacttttcctactaaagttatcttcttgtggcttctgaatttgaatagaacgtgttcagacttgttagctaaatttgttgatgcgagatacttgacagaatcccgttgatgaactcatctgtgtgaccaccgcctggtgatggaatctcgcgcggaagccgtggtgttactgactctcaagcaattcagtagataaatttgtataacatcattgcaaggggtgctagcaatcaattgtccaataccaaacggcggcaagtgcaaaggggcgatagagagtttctgcgaggaagggaaggaatccgtatgcctgaaaacttttgtacaagtgtctttgtaagggcgaggtctgctctgacatctctctgagatctgagatctgatacctgcaggataacttcgtataatgtatgctatacgaagttataactttgagttcagtttgggaactatttaaacctgctttaaatgaggaaaaaggaattcatcctatgttcttctattccataccgttccactcaaaacttgaacaaggttgttgttccaagttgtttttttaccgaattctcctctccctctaccttttgatgtcttttctgatcaactagtaccactttctcggtttcttcctcttggttgcacaaccactctctgtgtaccgactttgaaaagacttgtatcattgcatgcgcttgaaggctatcaattatcattcatagtgggtttatagttttgtccctgccatccacaatgtaccatagaccatcgctgccatggctgcgcgttgcgcgctgccacccagaccacctttttccagtccgatacaaaatcatgttagtcaattgagcacgggccacccaagggtgacggtcacccctaaggctccgggagtagtaaggcactataccagtttcttttacctccatgcaatttcaaccatggtgcatcgcatctagaatctaggattctaggaatctaggaatctaggaatctaggatctggttaaccccaaaccatattaagacaggctcaatgggcagttagggttagcgtgcaaggagcgccgaggaaccggtcaggagatggggagagcaagctgcaaggtgagatgcccgaaatttgaaatttgaaatgtaaaaccccccgattggctatcgggctcggcgctggaagctggaattggttaggcacgacataagtctttaggcactaggctaggtaggcactagccgtcctcctatcctcgttgctgggcgctggaagctggaggcttcagaaattagtacgatagatactgactcagtactgtgcgcacccatgcgctcccagatcccagatcccagctggtagcagcttgggagcttgggagcttggcatgttggcaagccacatcatgcatccatcatgcaatcatatcttttcaccttgacaacttacattggttgtac

SEQ ID NO: 300 - DNA, 8404 bp, synthetic construct
  source 1..8404: mol_type = other DNA
accgcctctccccgcgcgttggccgattcattaatgcagctggcacgacaggtttcccgactggaaagcgggcagtgagcgcaacgcaattaatgtgagttagctcactcattaggcaccccaggctttacactttatgcttccggctcgtatgttgtgtggaattgtgagcggataacaatttcacacaggaaacagctatgaccatgattacgccaagctatttaggtgacactatagaatactcaagctatgcatcaagcttggtaccgagctcggatccactagtcctgcaggtatcagatctcagatctcagagagatgtcagagcagacctcgcccttacaaagacacttgtacaaaagttttcaggcatacggattccttcccttcctcgcagaaactctctatcgcccctttgcacttgccgccgtttggtattggacaattgattgctagcaccccttgcaatgatgttatacaaatttatctactgaattgcttgagagtcagtaacaccacggcttccgcgcgagattccatcaccaggcggtggtcacacagatgagttcatcaacgggattctgtcaagtatctcgcatcaacaaatttagctaacaagtctgaacacgttctattcaaattcagaagccacaagaagataactttagtaggaaaagtagattgcaagcacactccgaggcttgctctcgggcgaagaagggatattttgggctcagagcgccatcagaacgacggacgctccaacaaaggggaagcaacagtggtgaacaccattagaaaaattcatccagcatcaaatggaactggagcttgttcatgtctgggttatcgatcccatatttctggaacagacgcttctggaggctaggggagaactcgcccagacaattccagaggatcgcaagatcttggtagcgatcggcgatgccaacccggccgacgtcaatgcagccaatgagcttgccctcgtcaaagatgaggttgtcaagcgagaaatcaccatgcgtcacgacagagtctggggaaaagggcaggagcttatgcatctctttccacacttgttccaccggccagccgttgcgctcgtcatcgaaatcactagcgtcgactagaccattgttcatgcgtgattgtgcctgggcaagcctaaaaacacggtcgctgttgaaagggcagttgcagaccggaatagagtgaaggcggcgcaaaaacacagccaaggcatccacgatgttctcgcccgagtcagggtattcctcgaggacctgaaaagcggtcttaccggggatggccgtagtcaacagccacgcatcgtcaggtgtacggatgaagtgcttgatggtggggagtggcatgaactcagttagccaattcagacggaccatttcgtcggttacgtcgtttgcaacgctacccttgccgtgtttaagaaagagctcgggggcgtccggttttccatagagtctgtagatcgtcgcacccgactgtccgacattatctcgagcccatttgtatccgtacaggtctgcgtccatgttggagttgagtcggggtcgcgatacgtgtgtcttttccttacccatggtgaaagagtaccggtgtgttggtaaagagacaagaatgacaagaagatgaagcactagttatatagggccggcagagttgctgcatgctgcggcagtctaaccgaagaaaaaatttgcacatgacgacccaggcactggcccacagtcacttcaactcccctcgtaatgcattttctgactggccttatgcctcgtgtttctgttttctttctcagcttgcgttgaatcttgggaacaaccctgccaatctaactaaattaaccaattcacccacttccgcttccgtcagcttttttccgcaccctcgatgtgcatcgaagttcgacaaactatagtgagatcgatctcgatcgtaatcggtaaagttgtgtagtatattggctattacaagaagcatccctggggaagggtctgcaggtgtcatggcctagtacagagggcaatgattaatatggatagtgacgcatgatgcatgatgcatgatgcatgatggatgcatagggcaaagcgaaccaatgccatctgcgtcatctgcatcgatgatcgatgtatctactacgtactatggcaaacaggaaacattggatacatggcaagatgacaatggtaacgtgcaatcttgtgcgaattagtggtcatagaggcaaggtcaaggctaacatgcaaggtctgagctcctgcaggactagtaacggccgccagtgtggcgcgccattgtcattcgtgattctagtactgtgggtggctgcgaaactccttcactcaatgaattacaatcatgattcgtgattcgcaccgatcccaccagcctctcgagaaaagcggacttgaacattcatgattcacgaccctgtgattcatgaatgccatccgatccagaacggacttgctactcacgactcagactgaatttttaaatgccctcatgatttgattcatgatcagcaatgccctcatgatttgattcatgattcgctgatcacagcggtgaagaacgtaacccattcacgattcagaaggcaagtactgcttcttgctcggctgctttgttgctgccgaggcgggctagcttgcacaaagatcgaggatcggtaatggcgcgccaggcggccgctcgacgacagtgagtatagtcaactatgctatctagtagccaaagtaagtctacattccgggctttgcaggggttagctatttcattagacaatacttacaaccttcgaagggcttccccagaattcaattctatattgattcaatatccacccatcggacccgctctccgtaccccctgttcgcttcgccactacaaccatgtcaagacctgagaatcgtagcaaattgccccactacggcccgagtgctgtcggctggttaaagtagaatgacttgggtagccagatcgagacgcctgacattgatacgcagacagcgcagtcagtttcaaactgacaactgacgcgtactggattgacaggactccttggccggtgccattcgaatcgcttgtagacctcttgccagcatcttgccagagaagcttgaaggctggatcgctcagcctgagctcacacttagtagctccactagtcactcaggtgctcagcctctcctcagcgcctcaagctcaagcctcagggcctcagctgcatcgagctctggtgccagtgccagtgccagtgccagtgccagtgccagtgccagtgccagtgaagagagtggtatgagccaagctatacccaaaagcaaatgatggttattgccagcttccatgcacccctggggcgaaggacaacgaacaacagacagagtttgaattattcactggcctagtactaccaatttaaatttggtggttcagcgcaggaacggcgcgagtgagcgtaagggcaaactccgcatggggcgtgacgtcagtgtccctctggctgaggcactccagcaggctctggtcaacgcatcaacgtgtgtgtgtgtctaccaagcacattgtgcgctcgctgtccgtgcgccgaaatcgcaccagtcagaacgtctataaaacccctcttgcttggagggttaccgggccgtcttttcccaacgctccggctcactcactactctacacaacaatgtccaacttgctcaccgtccaccagaacctcccggccctgccagtggacgcgaccagcgatgaagttcgaaaaaatcttatggatatgttccgcgatcgacaagccttttccgaacatacctggaagatgctgttgagcgtgtgccgatcgtgggccgcttggtgcaaactgaacaaccgcaagtggtttcccgccgagccggaagatgttcgtgattacctgctctacctgcaagcacgtggtttggcggtgaagactatccaacagcacctgggtcaacttaatatgcttcaccgccgatctggactcccacgtccctctgactccaacgctgtgtcccttgttatgcgtcgtattcgcaaagaaaacgtggacgctggcgaacgagcgaaacaggctttggcatttgaacgaactgacttcgatcaggtccgctccttgatggaaaactctgaccgttgccaagacatccgtaacctcgcgttcctgggaatcgcctacaataccctcctccgtatcgctgaaattgctcgcattcgagtgaaggacatttctcgaacagacggcggccgtatgcttattcatatcggtcgtactaaaacactcgtcagcactgctggagtcgagaaagcgctctctcttggagttactaaattggtggaacgatggatttctgtttctggagttgcggatgatcctaataactacttgttttgtcgtgttcgtaagaacggcgtcgccgcgccctccgccacatcccagctctccacacgtgcactcgagggaatcttcgaggcgactcaccgtctgatttacggcgctaaagacgatagcggtcaacgataccttgcctggtctggtcactccgcacgagtgggcgcagcccgcgacatggcgcgtgcaggagtgtccattccagaaatcatgcaagcgggcggatggacgaacgtcaacatcgtgatgaattatattcgtaacttggactcggaaaccggagcaatggtccgacttctcgaggatggcgattaagttgctccctttgctgttctatgatccaaaagatgcttagtgctccactctctactcccgactaccttttacgcattctgacatgactagtagtgcaatgttacccctggtgttttctcgcaatcactttctgtctgctatagcttttgatcgtcagtagttttttggtatagctaaagtagacttttgtacctggcgttcaatgtaattttactccttttttgtgcgatgcaacagatggtgtaaagatcgtcgttaaagttttggcttgatgcttgattcggtgacggttgcttgggtgatccttatatcgtctcctggtgttctcataagcccaggctcttcttagctatgtacaacaggtccaccactgactatgttatgtagaggcatgcatttaacttacggaaagatttaatggagaagaacgtacctagtcagatgcttgacatgaaaacgtattcctgcaattcacaaatcagtatcctgcctgtccactctctagagggcccaattcgccctatagtgagtcgtattacaattcactggccgtcgttttacaacgtcgtgactgggaaaaccctggcgttacccaacttaatcgccttgcagcacatccccctttcgccagctggcgtaatagcgaagaggcccgcaccgatcgcccttcccaacagttgcgcagcctatacgtacggcagtttaaggtttacacctataaaagagagagccgttatcgtctgtttgtggatgtacagagtgatattattgacacgccggggcgacggatggtgatccccctggccagtgcacgtctgctgtcagataaagtctcccgtgaactttacccggtggtgcatatcggggatgaaagctggcgcatgatgaccaccgatatggccagtgtgccggtctccgttatcggggaagaagtggctgatctcagccaccgcgaaaatgacatcaaaaacgccattaacctgatgttctggggaatataaatgtcaggcatgagattatcaaaaaggatcttcacctagatccttttcacgtagaaagccagtccgcagaaacggtgctgaccccggatgaatgtcagctactgggctatctggacaagggaaaacgcaagcgcaaagagaaagcaggtagcttgcagtgggcttacatggcgatagctagactgggcggttttatggacagcaagcgaaccggaattgccagctggggcgccctctggtaaggttgggaagccctgcaaagtaaactggatggctttctcgccgccaaggatctgatggcgcaggggatcaagctctgatcaagagacaggatgaggatcgtttcgcatgattgaacaagatggattgcacgcaggttctccggccgcttgggtggagaggctattcggctatgactgggcacaacagacaatcggctgctctgatgccgccgtgttccggctgtcagcgcaggggcgcccggttctttttgtcaagaccgacctgtccggtgccctgaatgaactgcaagacgaggcagcgcggctatcgtggctggccacgacgggcgttccttgcgcagctgtgctcgacgttgtcactgaagcgggaagggactggctgctattgggcgaagtgccggggcaggatctcctgtcatctcaccttgctcctgccgagaaagtatccatcatggctgatgcaatgcggcggctgcatacgcttgatccggctacctgcccattcgaccaccaagcgaaacatcgcatcgagcgagcacgtactcggatggaagccggtcttgtcgatcaggatgatctggacgaagagcatcaggggctcgcgccagccgaactgttcgccaggctcaaggcgagcatgcccgacggcgaggatctcgtcgtgacccatggcgatgcctgcttgccgaatatcatggtggaaaatggccgcttttctggattcatcgactgtggccggctgggtgtggcggaccgctatcaggacatagcgttggctacccgtgatattgctgaagagcttggcggcgaatgggctgaccgcttcctcgtgctttacggtatcgccgctcccgattcgcagcgcatcgccttctatcgccttcttgacgagttcttctgaattattaacgcttacaatttcctgatgcggtattttctccttacgcatctgtgcggtatttcacaccgcatacaggtggcacttttcggggaaatgtgcgcggaacccctatttgtttatttttctaaatacattcaaatatgtatccgctcatgagacaataaccctgataaatgcttcaataatagcacgtgaggagggccaccatggccaagttgaccagtgccgttccggtgctcaccgcgcgcgacgtcgccggagcggtcgagttctggaccgaccggctcgggttctcccgggacttcgtggaggacgacttcgccggtgtggtccgggacgacgtgaccctgttcatcagcgcggtccaggaccaggtggtgccggacaacaccctggcctgggtgtgggtgcgcggcctggacgagctgtacgccgagtggtcggaggtcgtgtccacgaacttccgggacgcctccgggccggccatgaccgagatcggcgagcagccgtgggggcgggagttcgccctgcgcgacccggccggcaactgcgtgcacttcgtggccgaggagcaggactgacacgtgctaaaacttcatttttaatttaaaaggatctaggtgaagatcctttttgataatctcatgaccaaaatcccttaacgtgagttttcgttccactgagcgtcagaccccgtagaaaagatcaaaggatcttcttgagatcctttttttctgcgcgtaatctgctgcttgcaaacaaaaaaaccaccgctaccagcggtggtttgtttgccggatcaagagctaccaactctttttccgaaggtaactggcttcagcagagcgcagataccaaatactgtccttctagtgtagccgtagttaggccaccacttcaagaactctgtagcaccgcctacatacctcgctctgctaatcctgttaccagtggctgctgccagtggcgataagtcgtgtcttaccgggttggactcaagacgatagttaccggataaggcgcagcggtcgggctgaacggggggttcgtgcacacagcccagcttggagcgaacgacctacaccgaactgagatacctacagcgtgagctatgagaaagcgccacgcttcccgaagggagaaaggcggacaggtatccggtaagcggcagggtcggaacaggagagcgcacgagggagcttccagggggaaacgcctggtatctttatagtcctgtcgggtttcgccacctctgacttgagcgtcgatttttgtgatgctcgtcaggggggcggagcctatggaaaaacgccagcaacgcggcctttttacggttcctgggcttttgctggccttttgctcacatgttctttcctgcgttatcccctgattctgtggataaccgtattaccgcctttgagtgagctgataccgctcgccgcagccgaacgaccgagcgcagcgagtcagtgagcgaggaagcggaagagcgcccaatacgcaa

SEQ ID NO: 301 - DNA, 4143 bp, synthetic construct
  source 1..4143: mol_type = other DNA
gcctcctgctcgatacgtcgatacgtcgatgctggatgagtacatgggtacatgggtacgggtactggatggtcgatggtcttctgtctggctcggcactgcctgactgggcaacgacgacgacgacgacgacgacgacgacgaccactggagccgtgctgcgatcgtcctaatgatcggggtggcaaggcacaccgtgcctgtgcctgacccacctgtgcacgacgtcatgggtcgcccgcctactagggtgtccgtcgcaggtcgcttagatgggacgcgggacgtgggacccctcgaccctcgattagctgcgcggccaccggccaccggccacttgcgtcaatgcgtcaatgcgtcaatgcgtcaacacggacctggtgcgttgacgcgctgacgtctaggcgcccaccggccaccacccaccagtacgcaatccagacccaggcagctccaagcttggggggttgggcagtacgccgtacggcgcggtcacagatctgagatctgcgacgctggcacggtgtccgcatcgcacgcgtcctaacacactgagtgtatactgtatcctgtacccagcacccgatatccaatgcccagtactcagtgtacccaatgtactcactcagtgtacttcctccgtactggctgcctgcggcctggcagacgggcgcctcagctcaaaccagcgcgatgcccagcccaacccattccattccatcccagtccagtctccagtccagtcgagccctgccctgccctgccttgccctgccctgccctgccctgcccggcacaccccaatcatttagcttagcgcccgcccacatatgccaacccccgagcgaggctcaatgttcgattctcgatgcgtgacgatgcttcgttacgctcggtcctccgcagccaggggttatataagtacgctcggtccgcttggtccaacatggtttgctcctaccaccatccgatccgtctactagctaccatcgtattctacccttctactgcactactgacagtcaaacaccttataacttcgtataatgtatgctatacgaagttatcctgcaggagctcagaccttgcatgttagccttgaccttgcctctatgaccactaattcgcacaagattgcacgttaccattgtcatcttgccatgtatccaatgtttcctgtttgccatagtacgtagtagatacatcgatcatcgatgcagatgacgcagatggcattggttcgctttgccctatgcatccatcatgcatcatgcatcatgcatcatgcgtcactatccatattaatcattgccctctgtactaggccatgacacctgcagacccttccccagggatgcttcttgtaatagccaatatactacacaactttaccgattacgatcgagatcgatctcactatagtttgtcgaacttcgatgcacatcgagggtgcggaaaaaagctgacggaagcggaagtgggtgaattggttaatttagttagattggcagggttgttcccaagattcaacgcaagctgagaaagaaaacagaaacacgaggcataaggccagtcagaaaatgcattacgaggggagttgaagtgactgtgggccagtgcctgggtcgtcatgtgcaaattttttcttcggttagactgccgcagcatgcagcaactctgccggccctatataactagtgcttcatcttcttgtcattcttgtctctttaccaacacaccggtactctttcaccatgggtaaggaaaagacacacgtatcgcgaccccgactcaactccaacatggacgcagacctgtacggatacaaatgggctcgagataatgtcggacagtcgggtgcgacgatctacagactctatggaaaaccggacgcccccgagctctttcttaaacacggcaagggtagcgttgcaaacgacgtaaccgacgaaatggtccgtctgaattggctaactgagttcatgccactccccaccatcaagcacttcatccgtacacctgacgatgcgtggctgttgactacggccatccccggtaagaccgcttttcaggtcctcgaggaataccctgactcgggcgagaacatcgtggatgccttggctgtgtttttgcgccgccttcactctattccggtctgcaactgccctttcaacagcgaccgtgtttttaggcttgcccaggcacaatcacgcatgaacaatggtctagtcgacgctagtgatttcgatgacgagcgcaacggctggccggtggaacaagtgtggaaagagatgcataagctcctgcccttttccccagactctgtcgtgacgcatggtgatttctcgcttgacaacctcatctttgacgagggcaagctcattggctgcattgacgtcggccgggttggcatcgccgatcgctaccaagatcttgcgatcctctggaattgtctgggcgagttctcccctagcctccagaagcgtctgttccagaaatatgggatcgataacccagacatgaacaagctccagttccatttgatgctggatgaatttttctaatggtgttcaccactgttgcttcccctttgttggagcgtccgtcgttctgatggcgctctgagcccaaaatatcccttcttcgcccgagagcaagcctcggagtgtgcttgcaatctacttttcctactaaagttatcttcttgtggcttctgaatttgaatagaacgtgttcagacttgttagctaaatttgttgatgcgagatacttgacagaatcccgttgatgaactcatctgtgtgaccaccgcctggtgatggaatctcgcgcggaagccgtggtgttactgactctcaagcaattcagtagataaatttgtataacatcattgcaaggggtgctagcaatcaattgtccaataccaaacggcggcaagtgcaaaggggcgatagagagtttctgcgaggaagggaaggaatccgtatgcctgaaaacttttgtacaagtgtctttgtaagggcgaggtctgctctgacatctctctgagatctgagatctgatacctgcaggataacttcgtataatgtatgctatacgaagttataactttgagttcagtttgggaactatttaaacctgctttaaatgaggaaaaaggaattcatcctatgttcttctattccataccgttccactcaaaacttgaacaaggttgttgttccaagttgtttttttaccgaattctcctctccctctaccctttgatgtcttttctgatcaactagtaccactttctcggtttcttcctcttggttgcacaaccactctctgtgtaccgactttgaaaagacttgtatcattgcatgcgcttgaacgctatcaattatcattcatagtgggtttatagttttgtccttgccatccacaatgtaccatagaccatcgctgccatggctgcgcgttgcgcgctgccacccagaccaccttgttccaggtccgatacaaaatcatgttagtcaattgagcacgggccacccaagggtgacggtcacccctaaggctccgggagtagtaaggcactataccagtctcttttacctccatgcgattcctaccatggtgcatcgcatctagaatctaggattctaggaatctagaaatctaggaatctaggatctggttaaccccaaaccatgtttattagacaggctcaatgggcaggtagggttagcgtgcaaggcagcgccgaggaaccggtcaggagatggggagagcaagtgcaaggtgagatgcccgaaatttgaaatttgaaatgtaaaaccccccgattggctatcgggctcggcgctggcagggctggaattggttaggcacgacataagtctgtaggcactaggctaggtaggcactagccgtcctcctatcctcgttgctgggcgctgggcgctggaagcttcagagcttcagattagtatgatagatactgcctcagtactgtgcgcacccatgcgctcccatgcatcccagctcctagctggtagcagcttgggagcttgggagcttggcatgttggcaagccacatcatatgcatctcatcatgcaatcatatcttttccccttgacaacttacattggttgtac

SEQ ID NO: 302 - DNA, 3119 bp, synthetic construct
  source 1..3119: mol_type = other DNA
cgtcacggagagtcaccttgcgcgagtagccacctacgtcatatgcgtcatatgcgtcatatgatatttatgtttttcaatacgcttcgagcgttcgactgtttgtccgttcgactgttcgactgctcgactgttcgactgttcgactgctcgactgttcgactgttcgactgttcgaccagcttagctaactaacccattctgattcaagagcttgagcgaacttgagcgagcttgaacccttgaaccaattgcccggttgttgcctgcccctggcccccgtccccagtgccccgtccccgtcccccgatcgactggcccccatgcggcttacgtctttgcagcgggctgccggcagccggcagtggacaaccgacagcttggcgcgcttgatgcatgatgcatgatgcttgacaggcagacagctggagtgctggagtgcactgaagctcggaagctgattcgctgagtcgctgagtcgctgagttgctgaatcgctgaacctaagagtgctacgatcttctactgaataattgaatttgaagattctatataaaccgactgttcatagatctctcctttgtcccggactacctctacatctacatccttctactgcactactgacagtcaaacaccttataacttcgtataatgtatgctatacgaagttatcctgcaggagctcagaccttgcatgttagccttgaccttgcctctatgaccactaattcgcacaagattgcacgttaccattgtcatcttgccatgtatccaatgtttcctgtttgccatagtacgtagtagatacatcgatcatcgatgcagatgacgcagatggcattggttcgctttgccctatgcatccatcatgcatcatgcatcatgcatcatgcgtcactatccatattaatcattgccctctgtactaggccatgacacctgcagacccttccccagggatgcttcttgtaatagccaatatactacacaactttaccgattacgatcgagatcgatctcactatagtttgtcgaacttcgatgcacatcgagggtgcggaaaaaagctgacggaagcggaagtgggtgaattggttaatttagttagattggcagggttgttcccaagattcaacgcaagctgagaaagaaaacagaaacacgaggcataaggccagtcagaaaatgcattacgaggggagttgaagtgactgtgggccagtgcctgggtcgtcatgtgcaaattttttcttcggttagactgccgcagcatgcagcaactctgccggccctatataactagtgcttcatcttcttgtcattcttgtctctttaccaacacaccggtactctttcaccatgggaacgactttagatgataccgcctaccgttataggacatcagtaccgggcgatgcagaagcaattgaagcccttgatggatcattcaccacagacacagtttttcgcgtgacagctactggtgacggatttactctccgtgaagtgcctgtagatccgccattgacgaaagtatttccagatgatgagagtgatgacgagagcgatgatggcgaagatggtgatcctgactcgcgcactttcgtcgcatacggtgatgatggtgacctggccggatttgttgttgtgtcctactcggggtggaaccgtagattgaccgtcgaagatatcgaagtcgcgccagaacatcgtggtcatggcgtgggacgagcactgatgggtctagctacggaattcgctcgagagcgtggggcgggtcacttatggcttgaagttaccaatgtaaatgctcctgctattcacgcttatcgccgaatgggtttcaccttgtgtggcctcgacacggcattgtatgacggtactgcttctgacggggagcaagcgctatacatgtctatgccctgcccctaatggtgttcaccactgttgcttcccctttgttggagcgtccgtcgttctgatggcgctctgagcccaaaatatcccttcttcgcccgagagcaagcctcggagtgtgcttgcaatctacttttcctactaaagttatcttcttgtggcttctgaatttgaatagaacgtgttcagacttgttagctaaatttgttgatgcgagatacttgacagaatcccgttgatgaactcatctgtgtgaccaccgcctggtgatggaatctcgcgcggaagccgtggtgttactgactctcaagcaattcagtagataaatttgtataacatcattgcaaggggtgctagcaatcaattgtccaataccaaacggcggcaagtgcaaaggggcgatagagagtttctgcgaggaagggaaggaatccgtatgcctgaaaacttttgtacaagtgtctttgtaagggcgaggtctgctctgacatctctctgagatctgagatctgatacctgcaggataacttcgtataatgtatgctatacgaagttataactttgagttcagtttgggaactatttaaacctgcttcctcctttattgaaccactcttgtggctaattaatccaatgccttgccgccctcaaatacacattgtttttaaatgttaattgaatattcaaatgcaagttgtatactctacatttttgcattcccaaccttttttttatcaacttttgtcttagctgctttacaatagttccatagcgctgaattccctttgggatacatgcacgtcagaaggattgttggcactcggaaactggtcgcagctaaatgccgaattgcctgttgctctggtgcaagtaaacaaacacaaggtcaagaaactggaataacagaatgtttccttcttgctttgattgctttgatcaggcacatctacagtatcttatggggcaagaaggctagagtaggccaaaacaagataccatcatggatggggtagtacttccatccctggtcaaccgatgagactacgaagaagacatactgttgaataattacgatgactaacgttttttggacaaggggaaagaacgtagcgtagctgcttcagaatgaatctaacggtagatcaggatctgaatgccctggttgaaacgcttgagaacctgagagcctaagatccatg

SEQ ID NO: 303 - DNA, 3906 bp, synthetic construct
  source 1..3906: mol_type = other DNA
ccgcatcagcacctcagcctctcagtctctttcggtcaggtcccaaattttcagcatcatgccgagagcgaaactagcgaagcgtaaagtgaggcgttgagacgttgagactttgggatctcatggcatcgtggatctcatgcatcatcatgcatcaggatcaggaatctcgttcgatctcatgaccatgtaagcggggcatagcggtccagtaacgtcatacagcctgcgattcccgccggcttaactcgccgctatgctgcgctcagccgctactgagacactgagggcgctgaggcgctgaggcggcatgagatctatggcatagcggcctaacatcgagaccttgaagcgttgaaatttgaaacgtgaagcgcgtgaagctagaagctggaaacttgactgccctcgcggcgacaaagccagaaataccgtggggtaaactgagcaattcaagcctcctaacacggagaccagctccacctgctcagcgctcagcgcgctcagcgccagcagggttagtgcacgacccagttttgtcggctacatcatgcataccattcattcgtctgcatcgatcatagatcatagatcatctacttgcatgcatgatactatgatgtacatcatgcatcatggtatcatggtattatggtacatgtgcacctcaacgcgcaatcacagtcgagcggagcttgaatcagaccagcgaaggaagctgatcgaaacggtgcccccaattactgagaccgatctgcttgaccctgcgcatcctattgctgcgcgctgacctcatgccccctcatgtcgggctggatggataccacacccgctggggaagtcttcgtcattggcagttgattgaaaaccttcgggggatgcccatgcgcaccgtgctatataaatggctgttgttctcatctcatcaaggtcccagaacaacttcttcatctgttgttactaccaccactcccaaccagcctgaagaaccaacatcatccttctactgcactactgacagtcaaacaccttataacttcgtataatgtatgctatacgaagttatcctgcaggagctcagaccttgcatgttagccttgaccttgcctctatgaccactaattcgcacaagattgcacgttaccattgtcatcttgccatgtatccaatgtttcctgtttgccatagtacgtagtagatacatcgatcatcgatgcagatgacgcagatggcattggttcgctttgccctatgcatccatcatgcatcatgcatcatgcatcatgcgtcactatccatattaatcattgccctctgtactaggccatgacacctgcagacccttccccagggatgcttcttgtaatagccaatatactacacaactttaccgattacgatcgagatcgatctcactatagtttgtcgaacttcgatgcacatcgagggtgcggaaaaaagctgacggaagcggaagtgggtgaattggttaatttagttagattggcagggttgttcccaagattcaacgcaagctgagaaagaaaacagaaacacgaggcataaggccagtcagaaaatgcattacgaggggagttgaagtgactgtgggccagtgcctgggtcgtcatgtgcaaattttttcttcggttagactgccgcagcatgcagcaactctgccggccctatataactagtgcttcatcttcttgtcattcttgtctctttaccaacacaccggtactctttcaccatgggaacgactttagatgataccgcctaccgttataggacatcagtaccgggcgatgcagaagcaattgaagcccttgatggatcattcaccacagacacagtttttcgcgtgacagctactggtgacggatttactctccgtgaagtgcctgtagatccgccattgacgaaagtatttccagatgatgagagtgatgacgagagcgatgatggcgaagatggtgatcctgactcgcgcactttcgtcgcatacggtgatgatggtgacctggccggatttgttgttgtgtcctactcggggtggaaccgtagattgaccgtcgaagatatcgaagtcgcgccagaacatcgtggtcatggcgtgggacgagcactgatgggtctagctacggaattcgctcgagagcgtggggcgggtcacttatggcttgaagttaccaatgtaaatgctcctgctattcacgcttatcgccgaatgggtttcaccttgtgtggcctcgacacggcattgtatgacggtactgcttctgacggggagcaagcgctatacatgtctatgccctgcccctaatggtgttcaccactgttgcttcccctttgttggagcgtccgtcgttctgatggcgctctgagcccaaaatatcccttcttcgcccgagagcaagcctcggagtgtgcttgcaatctacttttcctactaaagttatcttcttgtggcttctgaatttgaatagaacgtgttcagacttgttagctaaatttgttgatgcgagatacttgacagaatcccgttgatgaactcatctgtgtgaccaccgcctggtgatggaatctcgcgcggaagccgtggtgttactgactctcaagcaattcagtagataaatttgtataacatcattgcaaggggtgctagcaatcaattgtccaataccaaacggcggcaagtgcaaaggggcgatagagagtttctgcgaggaagggaaggaatccgtatgcctgaaaacttttgtacaagtgtctttgtaagggcgaggtctgctctgacatctctctgagatctgagatctgatacctgcaggataacttcgtataatgtatgctatacgaagttataactttgagttcagtttgggaactatttaaacctgcttactatgatgcatgatgtactctacctgtgggtttaccgttttatcttaccttgtcaatcattaatcattgatcatccctgcaatttatttggaacgataccacctaccgtaatctcattggtgcaccctccccactaattttcttttccccactggtttacatcctactctgcaaacaaaccgctgatgtttagttcctcccggcagtcttattaattgttgtcgaagctctctttattagtaatacattttcctgatgcaccttgatcctagcttcaagcttcaagcttcaagatcttcatttgcatcccatagatcctgctgctaagcattccggaacgtaagagtaaattgtattttatggtcatgtttgagttagtcgaatttggtgtgaaccgagctcggcattctcaacgactcagcaactcagcacactcagcatactcagcaactcagtacaggctcagtacttagcttcaagtgcctcagcaaggaacccgagtcagtttggtcattggacctaagccacgggttaattccaagaaatgtagtaaatagggcaatgtcactggcaacttgtcaagtggagcacattcttcccctgataagctcctcgaatatccatcctgcatcagcacatcagtgcatcagcgcatcggcttaacgtgaccacccttacgataaacagctagaccatttcgaccatcttgatcatttcgaccattcggacatggagtcgaccatcgaagtcgtgagtcattaagccctgttgcctccggcgtcgggagcacgataccagaactgtagtgaggcgatgcaaatcaacaggtcataaacaactccactcgtcttctgccacttggtctgccttgtgtccttgtgtcaatcgggaataatgtggtaaggacaatattaggggctttgcacaattcaaagaatgcaatgccgttcggcacgatgtgctaactacaaggtacaacgtacacaacgtacaagtagc

SEQ ID NO: 304 - DNA, 4883 bp, synthetic construct
  source 1..4883: mol_type = other DNA
cgtcacggagagtcaccttgcgcgagtagccacctacgtcatatgcgtcatatgcgtcatatgatatttatgtttttcaatacgcttcgagcgttcgactgtttgtccgttcgactgttcgactgctcgactgttcgactgttcgactgctcgactgttcgactgttcgactgttcgaccagcttagctaactaacccattctgattcaagagcttgagcgaacttgagcgagcttgaacccttgaaccaattgcccggttgttgcctgcccctggcccccatgcggcttacgtctttgcagcgggctgccggcagccggcagtggacaaccgacagcttggcgcgcttgatgcatgatgcatgatgcttgacaggcagacagctggagtgctggagtgcactgaagctcggaagctgattcgctgagtcgctgagtcgctgagttgctgaatcgctgaacctaagagtgctacgatcttctactgaataattgaatttgaagattctatataaaccgactgttcatagatctctcctttgtcccggactacctctacatctacatctacatcttattattcaatatgaaagcttccatgctggaggacttgaacaaattcagcgtcaaagagatcgacatcccgtcccccaaaaaggatgaggtcgtcgtgaaggtgatggcggcaggcacgtgtggatccgattcgcataaaatgattagcggatggaaatatggctatcccgcggtgatgggacacgaattttctggaattgtgacacaactgggagaaaacgtgtccaacgtcagcgtcggtcaacacgtcgccgtggctcccttcattccctgcttcaagtgtcattattgtcaaatcggactcttccagatgtgtgaaaattattccatgctcggtcagcaaaaatttggaggtttcgagcaatacgtttccgtcccggcacgtaacgttctggacatcggcaagatgtcgttcgaggaaggtgcccttattgaaccgatggcagttgcggcccacgctgttatgggaattaaaccggagctgggtgatacagttgcggtcttcggcctcggtacagtcggagatcttgttgtccgtcttcttatttcctcgggagcgacaaacgtcattggcattgacattgacgaccagaagcttgaaaagggactggatgagggttgcacacacgtgatcaactctgccaaagagtctcttgaagaaaagatcatggaatacaccgacggtctgggtgtcgatatttccatggaatgcgccggcagcaaaatcactgaggagcaaacactgctcgttacgaaacgccgtggaaaggttggatttgtcggtattgcttatagcgacgttctgctccatcagaaagcatttgagaacatcttccgccacgagcttacggtgactggattttggaattcctattccgcaccatttcctggacgcgagtggaccaactcgatccaattggttaatcgtggtcgtatcaagatcaaagatctcattactcatcgatttgagcttgaagacatgcaaaaagcattcaatatgatcaccactcgttcggaatcgtttaataaggtcatgtttttccccaacggcatcaattaacacggatcaacaaaaatgtgcgccagctttgttgtgtgcccttttcctctagcggatcctatccacatttcgtgaatgaaccgattaagctctgacgagatttccttgttttctgtagatacctcttgtagaggtgtcaaagttatgttgtgatcgagagagttacctgcaaggtattatgcaagcggcttgatgaggacactcaactacgtgtgagtaggagtgcgttgctcagcagttgacgcgtgagccgcttgagcagcttgataaaggtcctaatcgtcttccagctgttggcagacgacaatgtgctgtagtagtaggataggcccgtaaaagtgtagaagcaataggttgagactgactgtaatgggtacttgcgttcaaagactgaaagtccaaaggattgctcaaaggcccctgaggtctgagcctctgagcgcgctcttcgtcaaaattcgccggggccatcggtcatcctctcgagggcagcatcttcctcttctactgcactactgacagtcaaacaccttataacttcgtataatgtatgctatacgaagttatcctgcaggagctcagaccttgcatgttagccttgaccttgcctctatgaccactaattcgcacaagattgcacgttaccattgtcatcttgccatgtatccaatgtttcctgtttgccatagtacgtagtagatacatcgatcatcgatgcagatgacgcagatggcattggttcgctttgccctatgcatccatcatgcatcatgcatcatgcatcatgcgtcactatccatattaatcattgccctctgtactaggccatgacacctgcagacccttccccagggatgcttcttgtaatagccaatatactacacaactttaccgattacgatcgagatcgatctcactatagtttgtcgaacttcgatgcacatcgagggtgcggaaaaaagctgacggaagcggaagtgggtgaattggttaatttagttagattggcagggttgttcccaagattcaacgcaagctgagaaagaaaacagaaacacgaggcataaggccagtcagaaaatgcattacgaggggagttgaagtgactgtgggccagtgcctgggtcgtcatgtgcaaattttttcttcggttagactgccgcagcatgcagcaactctgccggccctatataactagtgcttcatcttcttgtcattcttgtctctttaccaacacaccggtactctttcaccatgggtaaggaaaagacacacgtatcgcgaccccgactcaactccaacatggacgcagacctgtacggatacaaatgggctcgagataatgtcggacagtcgggtgcgacgatctacagactctatggaaaaccggacgcccccgagctctttcttaaacacggcaagggtagcgttgcaaacgacgtaaccgacgaaatggtccgtctgaattggctaactgagttcatgccactccccaccatcaagcacttcatccgtacacctgacgatgcgtggctgttgactacggccatccccggtaagaccgcttttcaggtcctcgaggaataccctgactcgggcgagaacatcgtggatgccttggctgtgtttttgcgccgccttcactctattccggtctgcaactgccctttcaacagcgaccgtgtttttaggcttgcccaggcacaatcacgcatgaacaatggtctagtcgacgctagtgatttcgatgacgagcgcaacggctggccggtggaacaagtgtggaaagagatgcataagctcctgcccttttccccagactctgtcgtgacgcatggtgatttctcgcttgacaacctcatctttgacgagggcaagctcattggctgcattgacgtcggccgggttggcatcgccgatcgctaccaagatcttgcgatcctctggaattgtctgggcgagttctcccctagcctccagaagcgtctgttccagaaatatgggatcgataacccagacatgaacaagctccagttccatttgatgctggatgaatttttctaatggtgttcaccactgttgcttcccctttgttggagcgtccgtcgttctgatggcgctctgagcccaaaatatcccttcttcgcccgagagcaagcctcggagtgtgcttgcaatctacttttcctactaaagttatcttcttgtggcttctgaatttgaatagaacgtgttcagacttgttagctaaatttgttgatgcgagatacttgacagaatcccgttgatgaactcatctgtgtgaccaccgcctggtgatggaatctcgcgcggaagccgtggtgttactgactctcaagcaattcagtagataaatttgtataacatcattgcaaggggtgctagcaatcaattgtccaataccaaacggcggcaagtgcaaaggggcgatagagagtttctgcgaggaagggaaggaatccgtatgcctgaaaacttttgtacaagtgtctttgtaagggcgaggtctgctctgacatctctctgagatctgagatctgatacctgcaggataacttcgtataatgtatgctatacgaagttataactttgagttcagtttgggaactatttaaacctgcttcctcctttattgaaccactcttgtggctaattaatccaatgccttgccgccctcaaatacacattgtttttaaatgttaattgaatattcaaatgcaagttgtatactctacatttttgcattcccaaccttttttttatcaacttttgtcttagctgctttacaatagttccatagcgctgaattccctttgggatacatgcacgtcagaaggattgttggcactcggaaactggtcgcagctaaatgccgaattgcctgttgctctggtgcaagtaaacaaacacaaggtcaagaaactggaataacagaatgtttccttcttgctttgattgctttgatcaggcacatctacagtatcttatggggcaagaaggctagagtaggccaaaacaagataccatcatggatggggtagtacttccatccctggtcaaccgatgagactacgaagaagacatactgttgaataattacgatgactaacgttttttggacaaggggaaagaacgtagcgtagctgcttcagaatgaatctaacggtagatcaggatctgaatgccctggttgaaacgcttgagaacctgagagcctaagatccatg

SEQ ID NO: 305 - DNA, 4629 bp, synthetic construct
  source 1..4629: mol_type = other DNA
tggcatgtaggcctgtaggggctatgcctatatgctcatgcactcatgtcgcgatgttgcgatatcgcgatggaccaaccaagcaagcgtgcagcgtgggcgcttgggccaagggtgctaagctaagtgtaagcactgaagtgctgaagtgctgaagtgctgaacgtggaacgtcaggatgacacatcctctcccttcggcttcgtccaagaaaggttggtcagccatctgagatctgagatctgaaatgaatataatgatgaattgagtcgatgagatctgactatcttgggagattgcaccaatgcgccacggtgaccagatggtcttggtcttagctggtatagtggcacctgatctgccttgacagatctcatgttcatacgttcatgcattcaatcttatcgtctagccgtctgcgatctgcccaactagacgacgacaaatgtaattgatccttgtaaccctgttgctggtcgcagcagcgcgatacgatgccgtcacagtatcggcatctctgtctcgacgacagtgagtatagtcaactatgctatctagtagccaaagtaagtctacattccgggctttgcaggggttagctatttcattagacaatacttacaaccttcgaagggcttccccagaattcaattctatattgattcaatatccacccatcggacccgctctccgtaccccctgttcgcttcgccactacaaccatgtcaagacctgagaatcgtagcaaattgccccactacggcccgagtgctgtcggctggttaaagtagaatgacttgggtagccagatcgagacgcctgacattgatacgcagacagcgcagtcagtttcaaactgacaactgacgcgtactggattgacaggactccttggccggtgccattcgaatcgcttgtagacctcttgccagcatcttgccagagaagcttgaaggctggatcgctcagcctgagctcacacttagtagctccactagtcactcaggtgctcagcctctcctcagcgcctcaagctcaagcctcagggcctcagctgcatcgagctctggtgccagtgccagtgccagtgccagtgccagtgccagtgccagtgccagtgaagagagtggtatgagccaagctatacccaaaagcaaatgatggttattgccagcttccatgcacccctggggcgaaggacaacgaacaacagacagagtttgaattattcactggcctagtactaccaatttaaatttggtggttcagcgcaggaacggcgcgagtgagcgtaagggcaaactccgcatggggcgtgacgtcagtgtccctctggctgaggcactccagcaggctctggtcaacgcatcaacgtgtgtgtgtgtctaccaagcacattgtgcgctcgctgtccgtgcgccgaaatcgcaccagtcagaacgtctataaaacccctcttgcttggagggttaccgggccgtcttttcccaacgctccggctcactcactactctacacaacaaatgaccgacacaattgacgttgctgctttccaagcacacaaggctttccaaggcgaccaggagtcgtaccgtaagggctcgaaccgtcctggtttgcttgatggtgagcgtcgtcgctcatcggtttctgatgccaagatcaagctcaactcgggtcactacattcccgtcgtcgcgcttggtgtgtacaaggcacctaacgattcgactaccgaggatgccgtcaagtgggcttttgaggctggataccgtcatgttgattcgggtatgttacggttctctcccttgacctcttgatctctttgatctggtagctgaccattcatgaattgcaatctccagctgctcgatacgccaatgaggaagctgttggccgtgcattgaatgactttgtcaagactaccggtgtcccccgcgaggaaatctttgttacgtctaagctttgggacgcagaccacgaacgtgctgacgctgcgattgatgaatccttgcaaaagctcggtttgacgtacatggacttgtacctgttgcattcgcccggtgctgaccgtgacactcggttgaaggcttggaaagctatggaagatgctgtgtacgctggtaagatcaagtccattggtgtttccaactttgatgtagaagagttggatgacttgttggccaactgccgtattaagcctgctgtcaatcaaattgaatcgcatccattcttccaacatgaagatttgcgcaaagctaccattgaacgtggtattcacgtacaagcatattcgcctatggcacaaggtgctgcattggaacgtcctgagattgttgctattgccaagaagcacggtaagagtactgcacaaattttgctcaagtggggtatcaacattggtaacattgtgttacctaagagtttgactcgatcgcgtattgaagccaatgcagacttgtttgactttgaattggatcaagatgatatggatgtactgaacaatttggatgaaggtatgaagatgggcaaattgggtcctgctggtactagtgctcctggatcgcgtcgtacatctagtaactcgggtggcttgtctggtggtaaattacaaatgagttccaagtaacacgaagggtttcccatctgtgtgacctgatccctttttacgtttttttgttttgttttttcttttgttcatgatcaacttgggagtgattcctcttggtgatgtcgaaaattgaactgttataccaatattctgttgcctttgtttcctgtttgtagtttactactttttacagtagtcgttgttcctgccttgcttgcgtttgtcagggtttccctttagcttagtaccaatatctagccttaattttgcttattctttctcaccgcccatgattgatttcaatcatgattaatgatttatgcatgaaaactcaaaatactcaattgtcttgtacaaggcaatcacaagctggtcagccattctcagcgcctataagagctttcagccaggccggccccaaaacgatctaccctgtggacctggctaggctaaactttggaaagtcatgcaattatgaacgtttgaagctcaagcgctcctaccctctcctggagcagtgcttgaagactgagtccgtctcagataacttcgtataatgtatgctatacgaagttatcctgcaggagctcagaccttgcatgttagccttgaccttgcctctatgaccactaattcgcacaagattgcacgttaccattgtcatcttgccatgtatccaatgtttcctgtttgccatagtacgtagtagatacatcgatcatcgatgcagatgacgcagatggcattggttcgctttgccctatgcatgcatcatgcatcatgcatcatgcgtcatgcgtcactatccatattaatcattgccctctgtactaggccatgacacctgcagacccttccccagggatgcttcttgtaatagccaatatactacacaactttaccgattacgatcgagatcgatctcactatagtttgtcgaacttcgatgcacatcgagggtgcggaaaaaagctgacggaagcggaagtgggtgaattggttaatttagttagattggcagggttgttcccaagattcaacgcaagctgagaaagaaaacagaaacacgaggcataaggccagtcagaaaatgcattacgaggggagttgaagtgactgtgggccagtgcctgggtcgtcatgtgcaaattttttcttcggttagactgccgcagcatgcagcaactctgccggccctatataactagtgcttcatcttcttgtcattcttgtctctttaccaacacaccggtactctttcaccatgggtaaggaaaagacacacgtatcgcgaccccgactcaactccaacatggacgcagacctgtacggatacaaatgggctcgagataatgtcggacagtcgggtgcgacgatctacagactctatggaaaaccggacgcccccgagctctttcttaaacacggcaagggtagcgttgcaaacgacgtaaccgacgaaatggtccgtctgaattggctaactgagttcatgccactccccaccatcaagcacttcatccgtacacctgacgatgcgtggctgttgactacggccatccccggtaagaccgcttttcaggtcctcgaggaataccctgactcgggcgagaacatcgtggatgccttggctgtgtttttgcgccgccttcactctattccggtctgcaactgccctttcaacagcgaccgtgtttttaggcttgcccaggcacaatcacgcatgaacaatggtctagtcgacgctagtgatttcgatgacgagcgcaacggctggccggtggaacaagtgtggaaagagatgcataagctcctgcccttttccccagactctgtcgtgacgcatggtgatttctcgcttgacaacctcatctttgacgagggcaagctcattggctgcattgacgtcggccgggttggcatcgccgatcgctaccaagatcttgcgatcctctggaattgtctgggcgagttctcccctagcctccagaagcgtctgttccagaaatatgggatcg

SEQ ID NO: 306 - DNA, 1054 bp, Moniliella pollinis
  source 1..1054: mol_type = genomic DNA
atgtcctacaacaagaacatccctctcaacgacggtaactccatccctgcccttggctacggtacctggcaagcagaacctggtcaggtcggtgaaggtgtcaagctcgctgtcaaagctggctaccgtcacttggacttggccaaagtttaccagaaccaaaccgagattggccaagctctcaaggaactgtttgatgagggtgttgtcaagcgtgaggaccttttcatcacttccaagctttggaacaaccgccacgctcctgagcacgttgagcctgcgctcgacgagactcttaaggagctgggtctatcctatctggacctgtacttgattcacgtacgttttggccccttttgtgaattactatgaacatcagaagactaacttgattgtcgtgttgcagtggcctgttgctttcaagttcactactcccgatgaattgctccctgctgaccctaccaacaaggatcttgcctacgttgacgattcggtaaaattgtccgacacctggaaggcggtcgtcgccctgaagaagacgggtaagaccaagtcggttggtgtttcgaacttcagcactcgtctggtcgacttggttgaggaagcttcgggcgaacgtcctgcggtaaaccagatcgaagctcaccccttgttgcaacaagacgagttggttgctcaccataagagcaagaacattgtcatcactgcttacagtcccttgggcaacaatgtcgctggtaaaccacctctgactgagaaccccggtattgtggatgctgctaagcgtttgaaccatactcctgctgctgtgctcattgcttggggtattcaacgcgggtacagcgtcttggtcaagtcagttacaccctcacggatcaagagtaactttgaacagatcactctgtctgatgaggaattccaacgggttaccaacctcatcaaggagtacggtgagagccgtaacaacgttcctttcaattacaagccttcgtggtccattgacgtctttggtacccaggacgaggctaaggctacccacaagattaacgcttaa

SEQ ID NO: 307 - DNA, 984 bp, Moniliella pollinis
  source 1..984: mol_type = other DNA
atgtcctacaacaagaacatccctctcaacgacggtaactccatccctgcccttggctacggtacctggcaagcagaacctggtcaggtcggtgaaggtgtcaagctcgctgtcaaagctggctaccgtcacttggacttggccaaagtttaccagaaccaaaccgagattggccaagctctcaaggaactgtttgatgagggtgttgtcaagcgtgaggaccttttcatcacttccaagctttggaacaaccgccacgctcctgagcacgttgagcctgcgctcgacgagactcttaaggagctgggtctatcctatctggacctgtacttgattcactggcctgttgctttcaagttcactactcccgatgaattgctccctgctgaccctaccaacaaggatcttgcctacgttgacgattcggtaaaattgtccgacacctggaaggcggtcgtcgccctgaagaagacgggtaagaccaagtcggttggtgtttcgaacttcagcactcgtctggtcgacttggttgaggaagcttcgggcgaacgtcctgcggtaaaccagatcgaagctcaccccttgttgcaacaagacgagttggttgctcaccataagagcaagaacattgtcatcactgcttacagtcccttgggcaacaatgtcgctggtaaaccacctctgactgagaaccccggtattgtggatgctgctaagcgtttgaaccatactcctgctgctgtgctcattgcttggggtattcaacgcgggtacagcgtcttggtcaagtcagttacaccctcacggatcaagagtaactttgaacagatcactctgtctgatgaggaattccaacgggttaccaacctcatcaaggagtacggtgagagccgtaacaacgttcctttcaattacaagccttcgtggtccattgacgtctttggtacccaggacgaggctaaggctacccacaagattaacgct

SEQ ID NO: 308 - protein, 328 aa, Moniliella pollinis
MSYNKNIPLNDGNSIPALGYGTWQAEPGQVGEGVKLAVKAGYRHLDLAKVYQNQTEIGQALKELFDEGVVKREDLFITSKLWNNRHAPEHVEPALDETLKELGLSYLDLYLIHWPVAFKFTTPDELLPADPTNKDLAYVDDSVKLSDTWKAVVALKKTGKTKSVGVSNFSTRLVDLVEEASGERPAVNQIEAHPLLQQDELVAHHKSKNIVITAYSPLGNNVAGKPPLTENPGIVDAAKRLNHTPAAVLIAWGIQRGYSVLVKSVTPSRIKSNFEQITLSDEEFQRVTNLIKEYGESRNNVPFNYKPSWSIDVFGTQDEAKATHKINA

SEQ ID NO: 309 - DNA, 1093 bp, Moniliella pollinis
  source 1..1093: mol_type = genomic DNA
atgtcttacaaacagtacatccccctgaacgacggtaacaaaatccctgcccttgggtttggtacttggcaagctgaacctggtcaagtgggtgcaagtgtcaagaacgctgtcaaggctgggtaccgtcatttggatttggccaaagtgtaccaaaaccaatcggaaattggagtagcacttaaggaactgtttgatcaaggtattgtgaaacgggaagatttgtttattacgtccaaagtatggaataaccgtcatgctcctgaacatgttgagcctgcattggacgaaacattgaaagaacttggattgtcctacttggatttgtacttgattcatgtacgttttgatgtttccttcctatttttttttcttcttgccttacgaaagtcacgaaaggaaggagggggaactgactttcgatcacgattgtacatagtggcccgttgcgttcaagtttactacgcctcaggaactattccctactgagccggataacaaggaattggtcgcgattgatgattcaatcaagttggtagacacttggaaggcagttgtagcactcaaaaaaacgggtaagaccaaatccgttggtgtgtcgaacttcactacggatttggtagacttggttgaaaaagcgtcgggggaacgaccggcggtcaatcagattgaagcacacccattgttacaacaggatgaattggttgctcatcacaagagtaaaaacattgtgattactgcgtacagtcctttgggaaacaatgtgagtgggaaaccacctctgactcaaaaccctgggattgaagcaactgcaaaacggttaaatcatactcctgctgcggtcttgcttgcgtgggggattcaacgtggatacagtgtcttggtcaagagtgttacaccttctcgcattgagagcaattatgatcagattaccctttctcctgaagaattccagaaggttactgatctgatcaaggaatatggcgaaagtcgcaacaatattccgttgaattataagccttcatggccgatcagtgtgtttggtacggcggatgaagctaaggctactcataagattaacaccaacctttga

SEQ ID NO: 310 - DNA, 990 bp, Moniliella pollinis
  source 1..990: mol_type = other DNA
atgtcttacaaacagtacatccccctgaacgacggtaacaaaatccctgcccttgggtttggtacttggcaagctgaacctggtcaagtgggtgcaagtgtcaagaacgctgtcaaggctgggtaccgtcatttggatttggccaaagtgtaccaaaaccaatcggaaattggagtagcacttaaggaactgtttgatcaaggtattgtgaaacgggaagatttgtttattacgtccaaagtatggaataaccgtcatgctcctgaacatgttgagcctgcattggacgaaacattgaaagaacttggattgtcctacttggatttgtacttgattcattggcccgttgcgttcaagtttactacgcctcaggaactattccctactgagccggataacaaggaattggtcgcgattgatgattcaatcaagttggtagacacttggaaggcagttgtagcactcaaaaaaacgggtaagaccaaatccgttggtgtgtcgaacttcactacggatttggtagacttggttgaaaaagcgtcgggggaacgaccggcggtcaatcagattgaagcacacccattgttacaacaggatgaattggttgctcatcacaagagtaaaaacattgtgattactgcgtacagtcctttgggaaacaatgtgagtgggaaaccacctctgactcaaaaccctgggattgaagcaactgcaaaacggttaaatcatactcctgctgcggtcttgcttgcgtgggggattcaacgtggatacagtgtcttggtcaagagtgttacaccttctcgcattgagagcaattatgatcagattaccctttctcctgaagaattccagaaggttactgatctgatcaaggaatatggcgaaagtcgcaacaatattccgttgaattataagccttcatggccgatcagtgtgtttggtacggcggatgaagctaaggctactcataagattaacaccaacctt

SEQ ID NO: 311 - protein, 330 aa, Moniliella pollinis
MSYKQYIPLNDGNKIPALGFGTWQAEPGQVGASVKNAVKAGYRHLDLAKVYQNQSEIGVALKELFDQGIVKREDLFITSKVWNNRHAPEHVEPALDETLKELGLSYLDLYLIHWPVAFKFTTPQELFPTEPDNKELVAIDDSIKLVDTWKAVVALKKTGKTKSVGVSNFTTDLVDLVEKASGERPAVNQIEAHPLLQQDELVAHHKSKNIVITAYSPLGNNVSGKPPLTQNPGIEATAKRLNHTPAAVLLAWGIQRGYSVLVKSVTPSRIESNYDQITLSPEEFQKVTDLIKEYGESRNNIPLNYKPSWPISVFGTADEAKATHKINTNL

SEQ ID NO: 312 - DNA, 6592 bp, synthetic construct
  source 1..6592: mol_type = other DNA
tggcatgtaggcctgtaggggctatgcctatatgctcatgcactcatgtcgcgatgttgcgatatcgcgatggaccaaccaagcaagcgtgcagcgtgggcgcttgggccaagggtgctaagctaagtgtaagcactgaagtgctgaagtgctgaagtgctgaacgtggaacgtcaggatgacacatcctctcccttcggcttcgtccaagaaaggttggtcagccatctgagatctgagatctgaaatgaatataatgatgaattgagtcgatgagatctgactatcttgggagattgcaccaatgcgccacggtgaccagatggtcttggtcttagctggtatagtggcacctgatctgccttgacagatctcatgttcatacgttcatgcattcaatcttatcgtctagccgtctgcgatctgcccaactagacgacgacaaatgtaattgatccttgtaaccctgttgctggtcgcagcagcgcgatacgatgccgtcacagtatcggcatctctgtctttagctacgatggtgtgcgtgtaactgatcagtacacccgctgtatcaaaactctatcttcaatccgctaagaatcgtcaccatcagtacatcagtacatcagtgggctaagatctaatggtgtcgttcgacggccgcgggcactagccacgagccaagagcggtacagttgctgcgaaatggtgggcagcctgacaggttcagtttgaataggatgaaaacgccatgaagaacagagaagctggcaattgacgatagtggggcgagcgcacgctgcttgctggtccgagcgtaggacgaacgacaaaccatgggcggggccaccaggccccagggagggcgtcactggttggatgtcgtctgttaggctagagctcaggcgctcagggcctctggcccaagcctcggacgcaagcctctgacgagcgagcgcgcgctggggcgggtctgcgcaggaacggcaggactgccgagttggttgaatattgaatggttggatgattggtttgctgggtttggttttgacacgcacggcacaggacaagtgagtttggaggttggatttgcgcaggtagaaagggcgctcggcctcagggcctcagcgtcagcagacgagctcgccagtccaggtcagtacccagtgttcgttacttcccaccgtccagagtttgctgctgcctctcagcttgattcgtgtcggagaagtagaaatggtcacagcgtaccacacactgtccccatgcctgcgtcctgctccacgagtgtttagccacaaaaatttatggacaaccttactgagcctgtgctggggggtgctttagcaccagcactggcgccatggcgtcaaggttaattccactgtcattcgacaaccttcaactgatgggggcaactgggcacaaaaccttggatatataaccaactccaactcccacggttttttaccttttgctcttctccccaggactcactacttctactcctctattcatcttcaccaaaatggttaccgagatcgaagtggatgcggtgctgttcgacatggacggcaccctgattgactctacccctgctgtcaaccagacttgggccgagtacatcgaacgatacaacctcgactttgactacgtcatgtctcattgtcacggatgtcgaacggtagagagcctcaagaatatcgttggattgccggatgaccagttggaacaaggcgtagtcgagtttgaagggcgtattagtgaactggctgaagaggcggcacgtaccaatggtcctggtcaaattgtggctttgcccggcgcaaaagaactgcttgcccaactgaacaagggtagcgaacaacctggtcgtcgtcctggatgggccatcgttacttcggcaaccaaggcttacgcttacgtgggcttcagagcgtcgggcgtgaatggtacagaattccctcgtgcttttgtcacgggtgacaatgtcagcaagggcaaacctgatcctgaaccatacctcttgggagcaaagacgttacaacctcctgctgatcctaaacgttgtctcgtaatcgaagatgctcctccaggtattcgatcaggtgttgctgcaggtgccaaaacccttggattgaccactacccacgcggaaaacctcatgtggcaagcgggtgctaactgggtcgtaccagacttatcgagtgtttcggcacgttgggaaggtgaaggtgcggacgctcgtctttttattcgcattgaaaactcaggccagcgtccagagtaacatggtctgagccgcccacgattccttccttcatgagcgtatgacgacccttttacttagcatgtgcctctaaagaatacgttttgcatacccacatattcgtaaccctgtcctctatagcttctacaggtcatagtcactggctgccagtataaacgtgtcaatatctaatcctcataagatgcctcgctctgtcgtccacaataaaattcagtaacgcaaggactgcgcgactgagtgattgccgatgatatgagaaaactaatttcaagccatttgaacttcaataaatgcttccgctaacatcacggatcatcgatcatcaaccagcctccattaataggcctgccaccactcgcgcaatcatgaatctgatcatacctggctagcgattctcataacaccagaattacctgcccattaaagaaaccctattctgcctgtaacccggcaccagccggtccgaattcacgacagactaaggctctcgcgcagcttgaagactgagtccgtctcatacccacagtatcggcatctctgtctcgacgacagtgagtatagtcaactatgctatctagtagccaaagtaagtctacattccgggctttgcaggggttagctatttcattagacaatacttacaaccttcgaagggcttccccagaattcaattctatattgattcaatatccacccatcggacccgctctccgtaccccctgttcgcttcgccactacaaccatgtcaagacctgagaatcgtagcaaattgccccactacggcccgagtgctgtcggctggttaaagtagaatgacttgggtagccagatcgagacgcctgacattgatacgcagacagcgcagtcagtttcaaactgacaactgacgcgtactggattgacaggactccttggccggtgccattcgaatcgcttgtagacctcttgccagcatcttgccagagaagcttgaaggctggatcgctcagcctgagctcacacttagtagctccactagtcactcaggtgctcagcctctcctcagcgcctcaagctcaagcctcagggcctcagctgcatcgagctctggtgccagtgccagtgccagtgccagtgccagtgccagtgccagtgccagtgaagagagtggtatgagccaagctatacccaaaagcaaatgatggttattgccagcttccatgcacccctggggcgaaggacaacgaacaacagacagagtttgaattattcactggcctagtactaccaatttaaatttggtggttcagcgcaggaacggcgcgagtgagcgtaagggcaaactccgcatggggcgtgacgtcagtgtccctctggctgaggcactccagcaggctctggtcaacgcatcaacgtgtgtgtgtgtctaccaagcacattgtgcgctcgctgtccgtgcgccgaaatcgcaccagtcagaacgtctataaaacccctcttgcttggagggttaccgggccgtcttttcccaacgctccggctcactcactactctacacaacaaatggttaccgagatcgaagtggatgcggtgctgttcgacatggacggcaccctgattgactctacccctgctgtcaaccagacttgggccgagtacatcgaacgatacaacctcgactttgactacgtcatgtctcattgtcacggatgtcgaacggtagagagcctcaagaatatcgttggattgccggatgaccagttggaacaaggcgtagtcgagtttgaagggcgtattagtgaactggctgaagaggcggcacgtaccaatggtcctggtcaaattgtggctttgcccggcgcaaaagaactgcttgcccaactgaacaagggtagcgaacaacctggtcgtcgtcctggatgggccatcgttacttcggcaaccaaggcttacgcttacgtgggcttcagagcgtcgggcgtgaatggtacagaattccctcgtgcttttgtcacgggtgacaatgtcagcaagggcaaacctgatcctgaaccatacctcttgggagcaaagacgttacaacctcctgctgatcctaaacgttgtctcgtaatcgaagatgctcctccaggtattcgatcaggtgttgctgcaggtgccaaaacccttggattgaccactacccacgcggaaaacctcatgtggcaagcgggtgctaactgggtcgtaccagacttatcgagtgtttcggcacgttgggaaggtgaaggtgcggacgctcgtctttttattcgcattgaaaactcaggccagcgtccagagtaacacgaagggtttcccatctgtgtgacctgatccctttttacgtttttttgttttgttttttcttttgttcatgatcaacttgggagtgattcctcttggtgatgtcgaaaattgaactgttataccaatattctgttgcctttgtttcctgtttgtagtttactactttttacagtagtcgttgttcctgccttgcttgcgtttgtcagggtttccctttagcttagtaccaatatctagccttaattttgcttattctttctcaccgcccatgattgatttcaatcatgattaatgatttatgcatgaaaactcaaaatactcaattgtcttgtacaaggcaatcacaagctggtcagccattctcagcgcctataagagctttcagccaggccggccccaaaacgatctaccctgtggacctggctaggctaaactttggaaagtcatgcaattatgaacgtttgaagctcaagcgctcctaccctctcctggagcagtgcttgaagactgagtccgtctcagataacttcgtataatgtatgctatacgaagttatcctgcaggagctcagaccttgcatgttagccttgaccttgcctctatgaccactaattcgcacaagattgcacgttaccattgtcatcttgccatgtatccaatgtttcctgtttgccatagtacgtagtagatacatcgatcatcgatgcagatgacgcagatggcattggttcgctttgccctatgcatgcatcatgcatcatgcatcatgcgtcatgcgtcactatccatattaatcattgccctctgtactaggccatgacacctgcagacccttccccagggatgcttcttgtaatagccaatatactacacaactttaccgattacgatcgagatcgatctcactatagtttgtcgaacttcgatgcacatcgagggtgcggaaaaaagctgacggaagcggaagtgggtgaattggttaatttagttagattggcagggttgttcccaagattcaacgcaagctgagaaagaaaacagaaacacgaggcataaggccagtcagaaaatgcattacgaggggagttgaagtgactgtgggccagtgcctgggtcgtcatgtgcaaattttttcttcggttagactgccgcagcatgcagcaactctgccggccctatataactagtgcttcatcttcttgtcattcttgtctctttaccaacacaccggtactctttcaccatgggtaaggaaaagacacacgtatcgcgaccccgactcaactccaacatggacgcagacctgtacggatacaaatgggctcgagataatgtcggacagtcgggtgcgacgatctacagactctatggaaaaccggacgcccccgagctctttcttaaacacggcaagggtagcgttgcaaacgacgtaaccgacgaaatggtccgtctgaattggctaactgagttcatgccactccccaccatcaagcacttcatccgtacacctgacgatgcgtggctgttgactacggccatccccggtaagaccgcttttcaggtcctcgaggaataccctgactcgggcgagaacatcgtggatgccttggctgtgtttttgcgccgccttcactctattccggtctgcaactgccctttcaacagcgaccgtgtttttaggcttgcccaggcacaatcacgcatgaacaatggtctagtcgacgctagtgatttcgatgacgagcgcaacggctggccggtggaacaagtgtggaaagagatgcataagctcctgcccttttccccagactctgtcgtgacgcatggtgatttctcgcttgacaacctcatctttgacgagggcaagctcattggctgcattgacgtcggccgggttggcatcgccgatcgctaccaagatcttgcgatcctctggaattgtctgggcgagttctcccctagcctccagaagcgtctgttccagaaatatgggatcg

SEQ ID NO: 313 - DNA, 9208 bp, synthetic construct
  source 1..9208: mol_type = other DNA
cttaaacacggcaagggtagcgttgcaaacgacgtaaccgacgaaatggtccgtctgaattggctaactgagttcatgccactccccaccatcaagcacttcatccgtacacctgacgatgcgtggctgttgactacggccatccccggtaagaccgcttttcaggtcctcgaggaataccctgactctggcgagaacatcgtggatgccttggctgtgtttttgcgccgccttcactctattccggtctgcaactgccctttcaacagcgaccgtgtttttaggcttgcccaggcacaatcacgcatgaacaatggtctagtcgacgctagtgatttcgatgacgagcgcaacggctggccggtggaacaagtgtggaaagagatgcataagctcctgcccttttccccagactctgtcgtgacgcatggtgatttctcgcttgacaacctcatctttgacgagggcaagctcattggctgcattgacgtcggccgggttggcatcgccgatcgctaccaagatcttgcgatcctctggaattgtctgggcgagttctcccctagcctccagaagcgtctgttccagaaatatgggatcgataacccagacatgaacaagctccagttccatttgatgctggatgaatttttctaatggtgttcaccactgttgcttcccctttgttggagcgtccgtcgttctgatggcgctctgagcccaaaatatcccttcttcgcccgagagcaagcctcggagtgtgcttgcaatctacttttcctactaaagttatcttcttgtggcttctgaatttgaatagaacgtgttcagacttgttagctaaatttgttgatgcgagatacttgacagaatcccgttgatgaactcatctgtgtgaccaccgcctggtgatggaatctcgcgcggaagccgtggtgttactgactctcaagcaattcagtagataaatttgtataacatcattgcaaggggtgctagcaatcaattgtccaataccaaacggcggcaagtgcaaaggggcgatagagagtttctgcgaggaagggaaggaatccgtatgcctgaaaacttttgtacaagtgtctttgtaagggcgaggtctgctctgacatctctctgagatctgagatctgatacctgcaggataacttcgtataatgtatgctatacgaagttatgtcacagtatcggcatctctgtctcggaccccaagctctctagcttcaagctttcaagctagcttccagccagggtcatggaaccgtaggagctgggaaacgtgacgttgtcgctatgcctatcccatataagaattaacgtcgaatcatgaggcgcatgggaggctgcattggtggtatgatacataacgttatgattctatatgagcgatggagcgcggccgtctgccgctagtgtggaagttcgatacgcccagtccatttcgttcagatgacgtttggtccagaagtacggtacataccgagcgcaaacgtcgaacttatggccttggtcgctcgtggtccggcgtcgtcgacactttcatcaacggacgaaaggtagagccgaacgccagcggccaatggcgatggcgatagtagaatgaatagtcgtcagatctaggtcttaggctacaggccaccctgcctgaggcctgggggtcttacagcgagtctaaaaaacgaaaagccaacgtgccaacttgggcctgcccatgcaccctgccagagagccccaagctggtctgatgcaagcggagcaaaatgttggaagaatagtttcaacgatggtttggttccagtacgcacagtcgagagatgaggtactgcgcaacgagttgttggcgacggaaccgaagatggattgaactatttgatctacaggtgatggcgtggagtcgggcgtggggccgctgtgtgatatgtagaagtggcgctattcgagggctgcgcccgtctggatggatgcagaatgaagcttgcaggccgcagctggcaggatgggcgcagaacccggtgaaacatagttaaagcgcggggccagtgtcatatttcgcttgagccattctactcgttggcagcccaggcgccgctaatttacgccaactcttggtactcgagagctcgggcaatgtggtatataagcttgaggttccctacagcaaagcctggcttcttcaccacaaccgcactctagcaaacaatgaaagcttccatgctggaggacttgaacaaattcagcgtcaaagagatcgacatcccgtcccccaaaaaggatgaggtcgtcgtgaaggtgatggcggcaggcacgtgtggatccgattcgcataaaatgattagcggatggaaatatggctatcccgcggtgatgggacacgaattttctggaattgtgacacaactgggagaaaacgtgtccaacgtcagcgtcggtcaacacgtcgccgtggctcccttcattccctgcttcaagtgtcattattgtcaaatcggactcttccagatgtgtgaaaattattccatgctcggtcagcaaaaatttggaggtttcgagcaatacgtttccgtcccggcacgtaacgttctggacatcggcaagatgtcgttcgaggaaggtgcccttattgaaccgatggcagttgcggcccacgctgttatgggaattaaaccggagctgggtgatacagttgcggtcttcggcctcggtacagtcggagatcttgttgtccgtcttcttatttcctcgggagcgacaaacgtcattggcattgacattgacgaccagaagcttgaaaagggactggatgagggttgcacacacgtgatcaactctgccaaagagtctcttgaagaaaagatcatggaatacaccgacggtctgggtgtcgatatttccatggaatgcgccggcagcaaaatcactgaggagcaaacactgctcgttacgaaacgccgtggaaaggttggatttgtcggtattgcttatagcgacgttctgctccatcagaaagcatttgagaacatcttccgccacgagcttacggtgactggattttggaattcctattccgcaccatttcctggacgcgagtggaccaactcgatccaattggttaatcgtggtcgtatcaagatcaaagatctcattactcatcgatttgagcttgaagacatgcaaaaagcattcaatatgatcaccactcgttcggaatcgtttaataaggtcatgtttttccccaacggcatcaattaacgttgctccctttgctgttctatgatccaaaagatgcttagtgctccactctctactcccgactaccttttacgcattctgacatgactagtagtgcaatgttacccctggtgttttctcgcaatcactttctgtctgctatagcttttgatcgtcagtagttttttggtatagctaaagtagacttttgtacctggcgttcaatgtaattttactccttttttgtgcgatgcaacagatggtgtaaagatcgtcgttaaagttttggcttgatgcttgattcggtgacggttgcttgggtgatccttatatcgtctcctggtgttctcataagcccaggctcttcttagctatgtacaacaggtccaccactgactatgttatgtagaggcatgcatttaacttacggaaagatttaatggagaagaacgtacctagtcagatgcttgacatgaaaacgtattcctgcaattcacaaatcagtatcctgcctgtccactcgcttgaagactgagtccgtctcatacccacagtatcggcatctctgtccatcgttccagcttgccttgggtgctagccagcgcaaaagtccgacgaacagacgaattgaccgtagtcgatgacagtcgatgacagtcgatgacagtcgatgacagccgacgaccgacgaacaacaaccaaccgcacgcagcatgaggccgagaggctcaggctgagccgctaaggcgctgaagcttgaagctcggtggtccagtcagatctcatgatctcacaccgccgcgctgctgcggtcgtatggttcaatttgctgtgcctagcctagcctgggtacgtcggtaactagccactagccactggccattatttggctactgggcacactaggaggcgcactagtccatcgcaagcggtaacttacctaccggccactacctgatgatttccctcttgcctggcggcctggcggcctggcggcgcactctttgcgctcggacccgcaaattgcaaaccaacaaacgactagtgtccggtacgtgtgcccaagtaacctgggcagacatagaaccacattgatcgtagggaaccgcaatggaccagtacgctattctcagtacattctgtacacttttgcctagattggaatctggtgaggatcaagatcaaatttcaaaccaactccacggcactggttcccgacacttggactgtagtactgaggtactgaggtactgaggtactgaggctcaactgagtctcaactgaccgtgaccgcgcttgtgtggtggcgtggattctagtgttggatgtgcgcagtggtgtgtgcggtggtgcgttcagattcgtcggtagaacttgactattcacgtcttgtgctgcgctgacgcttggaacctggaatgttaaaccttgggtcctgaggatctccaccccccaagtcgactgggttctatataaagtcgggtaggcaattggctagggagaatctctcttttctctttccccagaacacctgttcactcacttctcacctctttacttacctacttcacaaatgccagtctgtctgatcgctccttccattttggcctcggacatgggagcactcacagccgagtgtaagcgaatgcttgactgtggtgctgattggctgcacatgggtacgttgccgtttcttgtgcgtacagaggtattgattgtttttatttatttattgacattgttatactacttctattctggcttgggatgcttgtgcagacgtcatggacgggtaagttctagtttgagcggaaagggtggctggggagaagggcacgagaataccgcctgcaaattgagtactgactgagtttggattctttttttgtttgccagccattttgtcccgaacattgttcttggggcccctatccttgcttcaatctctaaatctttacccgatgccgaactggattgccatatgatggtatctgctcctgaaaaggtacgtgtattaggtcccaaccaaaacttttgctgatggattcctgacatgcctctctctctccccccctccctctgcatacaccagtggatcaaagatatcgctgctgcaggcggcaagtcttacacttttcatctggaagcaacaagtacgatgacttttccttcctttcgagactcaagcagtgaactaaccatttgattggcacagatgaccccttggacactgtacgacagatcaaagcatccggtatgcgcgcagctgttgctattaacccaggaaccccctcagccgaaatttctgatgaactcgctagccaattggacatgatcctcgtaatgactgtctggccgggagctggtggacaaaagtttattggggaatgtatgcctaaagtaaccgaactacgacgtcgattccccgatttgaatattgaagtcgatggaggagttggacctaaaacgattgagaaatgtgccaaagctggtgccaatgttattgtggctggtactgctatcttccatgctgaacgtccaagggacgtaattcatttcctacgaacgcaagtgaatgaagctcaggctcaactgaaagaggaatgggccaagagcggttgataacacggatcaacaaaaatgtgcgccagctttgttgtgtgcccttttcctctagcggatcctatccacatttcgtgaatgaaccgattaagctctgacgagatttccttgttttctgtagatacctcttgtagaggtgtcaaagttatgttgtgatcgagagagttacctgcaaggtattatgcaagcggcttgatgaggacactcaactacgtgtgagtaggagtgcgttgctcagcagttgacgcgtgagccgcttgagcagcttgataaaggtcctaatcgtcttccagctgttggcagacgacaatgtgctgtagtagtaggataggcccgtaaaagtgtagaagcaataggttgagactgactgtaatgggtacttgcgttcaaagactgaaagtccaaaggattgctcaaaggcccctgaggtctgagcctctgagcgcgctcttcgtcaaaattcgccggggccatcggtcatcctctcgagggcagcatcttcctgcttgaagactgagtccgtctcagactcagtatcggcatctctgtctttagctacgatggtgtgcgtgtaactgatcagtacacccgctgtatcaaaactctatcttcaatccgctaagaatcgtcaccatcagtacatcagtacatcagtgggctaagatctaatggtgtcgttcgacggccgcgggcactagccacgagccaagagcggtacagttgctgcgaaatggtgggcagcctgacaggttcagtttgaataggatgaaaacgccatgaagaacagagaagctggcaattgacgatagtggggcgagcgcacgctgcttgctggtccgagcgtaggacgaacgacaaaccatgggcggggccaccaggccccagggagggcgtcactggttggatgtcgtctgttaggctagagctcaggcgctcagggcctctggcccaagcctcggacgcaagcctctgacgagcgagcgcgcgctggggcgggtctgcgcaggaacggcaggactgccgagttggttgaatattgaatggttggatgattggtttgctgggtttggttttgacacgcacggcacaggacaagtgagtttggaggttggatttgcgcaggtagaaagggcgctcggcctcagggcctcagcgtcagcagacgagctcgccagtccaggtcagtacccagtgttcgttacttcccaccgtccagagtttgctgctgcctctcagcttgattcgtgtcggagaagtagaaatggtcacagcgtaccacacactgtccccatgcctgcgtcctgctccacgagtgtttagccacaaaaatttatggacaaccttactgagcctgtgctggggggtgctttagcaccagcactggcgccatggcgtcaaggttaattccactgtcattcgacaaccttcaactgatgggggcaactgggcacaaaaccttggatatataaccaactccaactcccacggttttttaccttttgctcttctccccaggactcactacttctactcctctattcatcttcaccaaaatggttaccgagatcgaagtggatgcggtgctgttcgacatggacggcaccctgattgactctacccctgctgtcaaccagacttgggccgagtacatcgaacgatacaacctcgactttgactacgtcatgtctcattgtcacggatgtcgaacggtagagagcctcaagaatatcgttggattgccggatgaccagttggaacaaggcgtagtcgagtttgaagggcgtattagtgaactggctgaagaggcggcacgtaccaatggtcctggtcaaattgtggctttgcccggcgcaaaagaactgcttgcccaactgaacaagggtagcgaacaacctggtcgtcgtcctggatgggccatcgttacttcggcaaccaaggcttacgcttacgtgggcttcagagcgtcgggcgtgaatggtacagaattccctcgtgcttttgtcacgggtgacaatgtcagcaagggcaaacctgatcctgaaccatacctcttgggagcaaagacgttacaacctcctgctgatcctaaacgttgtctcgtaatcgaagatgctcctccaggtattcgatcaggtgttgctgcaggtgccaaaacccttggattgaccactacccacgcggaaaacctcatgtggcaagcgggtgctaactgggtcgtaccagacttatcgagtgtttcggcacgttgggaaggtgaaggtgcggacgctcgtctttttattcgcattgaaaactcaggccagcgtccagagtaacatggtctgagccgcccacgattccttccttcatgagcgtatgacgacccttttacttagcatgtgcctctaaagaatacgttttgcatacccacatattcgtaaccctgtcctctatagcttctacaggtcatagtcactggctgccagtataaacgtgtcaatatctaatcctcataagatgcctcgctctgtcgtccacaataaaattcagtaacgcaaggactgcgcgactgagtgattgccgatgatatgagaaaactaatttcaagccatttgaacttcaataaatgcttccgctaacatcacggatcatcgatcatcaaccagcctccattaataggcctgccaccactcgcgcaatcatgaatctgatcatacctggctagcgattctcataacaccagaattacctgcccattaaagaaaccctattctgcctgtaacccggcaccagccggtccgaattcacgacagactaaggctctcgcgcagcttgaagactgagtccgtctcagttgctgctacgacctcattgatcgatgatctccgacactttgagtagctttccatcctctctttactgtactttgtattcttgctactttgtgttctttcttaatggtcccgaaccggtgattttgctcatgatctttttttttttttttcgtcaactgcaagaagatgaaaaatctactgttcgatagcacctcataaccgttccagagtcccgacaaccacaaggatgtttcttagataggtgtcagcaagatccacaaaaaagtgtaggtattagatggtttcaagcaaggtacaatattctaattcaatactcatttgaataatcaatattcaacagcttctagcctacaagcttcaatgttctccgtcggttaactcagtatacttagtactcagttcaagtcagtgttgttaaaataaaatcacgtgatccaaaaacttgaaacttttcatttttctcctcagatgttggtgattcgtcccatagcggttaccacaac

SEQ ID NO: 314 - DNA, 9482 bp, synthetic construct
  source 1..9482: mol_type = other DNA
tggcatgtaggcctgtaggggctatgcctatatgctcatgcactcatgtcgcgatgttgcgatatcgcgatggaccaaccaagcaagcgtgcagcgtgggcgcttgggccaagggtgctaagctaagtgtaagcactgaagtgctgaagtgctgaagtgctgaacgtggaacgtcaggatgacacatcctctcccttcggcttcgtccaagaaaggttggtcagccatctgagatctgagatctgaaatgaatataatgatgaattgagtcgatgagatctgactatcttgggagattgcaccaatgcgccacggtgaccagatggtcttggtcttagctggtatagtggcacctgatctgccttgacagatctcatgttcatacgttcatgcattcaatcttatcgtctagccgtctgcgatctgcccaactagacgacgacaaatgtaattgatccttgtaaccctgttgctggtcgcagcagcgcgatacgatgccgtcacagtatcggcatctctgtccatcgttccagcttgccttgggtgctagccagcgcaaaagtccgacgaacagacgaattgaccgtagtcgatgacagtcgatgacagtcgatgacagtcgatgacagccgacgaccgacgaacaacaaccaaccgcacgcagcatgaggccgagaggctcaggctgagccgctaaggcgctgaagcttgaagctcggtggtccagtcagatctcatgatctcacaccgccgcgctgctgcggtcgtatggttcaatttgctgtgcctagcctagcctgggtacgtcggtaactagccactagccactggccattatttggctactgggcacactaggaggcgcactagtccatcgcaagcggtaacttacctaccggccactacctgatgatttccctcttgcctggcggcctggcggcctggcggcgcactctttgcgctcggacccgcaaattgcaaaccaacaaacgactagtgtccggtacgtgtgcccaagtaacctgggcagacatagaaccacattgatcgtagggaaccgcaatggaccagtacgctattctcagtacattctgtacacttttgcctagattggaatctggtgaggatcaagatcaaatttcaaaccaactccacggcactggttcccgacacttggactgtagtactgaggtactgaggtactgaggtactgaggctcaactgagtctcaactgaccgtgaccgcgcttgtgtggtggcgtggattctagtgttggatgtgcgcagtggtgtgtgcggtggtgcgttcagattcgtcggtagaacttgactattcacgtcttgtgctgcgctgacgcttggaacctggaatgttaaaccttgggtcctgaggatctccaccccccaagtcgactgggttctatataaagtcgggtaggcaattggctagggagaatctctcttttctctttccccagaacacctgttcactcacttctcacctctttacttacctacttcacaaatgaaagcttccatgctggaggacttgaacaaattcagcgtcaaagagatcgacatcccgtcccccaaaaaggatgaggtcgtcgtgaaggtgatggcggcaggcacgtgtggatccgattcgcataaaatgattagcggatggaaatatggctatcccgcggtgatgggacacgaattttctggaattgtgacacaactgggagaaaacgtgtccaacgtcagcgtcggtcaacacgtcgccgtggctcccttcattccctgcttcaagtgtcattattgtcaaatcggactcttccagatgtgtgaaaattattccatgctcggtcagcaaaaatttggaggtttcgagcaatacgtttccgtcccggcacgtaacgttctggacatcggcaagatgtcgttcgaggaaggtgcccttattgaaccgatggcagttgcggcccacgctgttatgggaattaaaccggagctgggtgatacagttgcggtcttcggcctcggtacagtcggagatcttgttgtccgtcttcttatttcctcgggagcgacaaacgtcattggcattgacattgacgaccagaagcttgaaaagggactggatgagggttgcacacacgtgatcaactctgccaaagagtctcttgaagaaaagatcatggaatacaccgacggtctgggtgtcgatatttccatggaatgcgccggcagcaaaatcactgaggagcaaacactgctcgttacgaaacgccgtggaaaggttggatttgtcggtattgcttatagcgacgttctgctccatcagaaagcatttgagaacatcttccgccacgagcttacggtgactggattttggaattcctattccgcaccatttcctggacgcgagtggaccaactcgatccaattggttaatcgtggtcgtatcaagatcaaagatctcattactcatcgatttgagcttgaagacatgcaaaaagcattcaatatgatcaccactcgttcggaatcgtttaataaggtcatgtttttccccaacggcatcaattaacgttgctccctttgctgttctatgatccaaaagatgcttagtgctccactctctactcccgactaccttttacgcattctgacatgactagtagtgcaatgttacccctggtgttttctcgcaatcactttctgtctgctatagcttttgatcgtcagtagttttttggtatagctaaagtagacttttgtacctggcgttcaatgtaattttactccttttttgtgcgatgcaacagatggtgtaaagatcgtcgttaaagttttggcttgatgcttgattcggtgacggttgcttgggtgatccttatatcgtctcctggtgttctcataagcccaggctcttcttagctatgtacaacaggtccaccactgactatgttatgtagaggcatgcatttaacttacggaaagatttaatggagaagaacgtacctagtcagatgcttgacatgaaaacgtattcctgcaattcacaaatcagtatcctgcctgtccactcgcttgaagactgagtccgtctcatacccacagtatcggcatctctgtctcgacgacagtgagtatagtcaactatgctatctagtagccaaagtaagtctacattccgggctttgcaggggttagctatttcattagacaatacttacaaccttcgaagggcttccccagaattcaattctatattgattcaatatccacccatcggacccgctctccgtaccccctgttcgcttcgccactacaaccatgtcaagacctgagaatcgtagcaaattgccccactacggcccgagtgctgtcggctggttaaagtagaatgacttgggtagccagatcgagacgcctgacattgatacgcagacagcgcagtcagtttcaaactgacaactgacgcgtactggattgacaggactccttggccggtgccattcgaatcgcttgtagacctcttgccagcatcttgccagagaagcttgaaggctggatcgctcagcctgagctcacacttagtagctccactagtcactcaggtgctcagcctctcctcagcgcctcaagctcaagcctcagggcctcagctgcatcgagctctggtgccagtgccagtgccagtgccagtgccagtgccagtgccagtgccagtgaagagagtggtatgagccaagctatacccaaaagcaaatgatggttattgccagcttccatgcacccctggggcgaaggacaacgaacaacagacagagtttgaattattcactggcctagtactaccaatttaaatttggtggttcagcgcaggaacggcgcgagtgagcgtaagggcaaactccgcatggggcgtgacgtcagtgtccctctggctgaggcactccagcaggctctggtcaacgcatcaacgtgtgtgtgtgtctaccaagcacattgtgcgctcgctgtccgtgcgccgaaatcgcaccagtcagaacgtctataaaacccctcttgcttggagggttaccgggccgtcttttcccaacgctccggctcactcactactctacacaacaaatgccagtctgtctgatcgctccttccattttggcctcggacatgggagcactcacagccgagtgtaagcgaatgcttgactgtggtgctgattggctgcacatgggtacgttgccgtttcttgtgcgtacagaggtattgattgtttttatttatttattgacattgttatactacttctattctggcttgggatgcttgtgcagacgtcatggacgggtaagttctagtttgagcggaaagggtggctggggagaagggcacgagaataccgcctgcaaattgagtactgactgagtttggattctttttttgtttgccagccattttgtcccgaacattgttcttggggcccctatccttgcttcaatctctaaatctttacccgatgccgaactggattgccatatgatggtatctgctcctgaaaaggtacgtgtattaggtcccaaccaaaacttttgctgatggattcctgacatgcctctctctctccccccctccctctgcatacaccagtggatcaaagatatcgctgctgcaggcggcaagtcttacacttttcatctggaagcaacaagtacgatgacttttccttcctttcgagactcaagcagtgaactaaccatttgattggcacagatgaccccttggacactgtacgacagatcaaagcatccggtatgcgcgcagctgttgctattaacccaggaaccccctcagccgaaatttctgatgaactcgctagccaattggacatgatcctcgtaatgactgtctggccgggagctggtggacaaaagtttattggggaatgtatgcctaaagtaaccgaactacgacgtcgattccccgatttgaatattgaagtcgatggaggagttggacctaaaacgattgagaaatgtgccaaagctggtgccaatgttattgtggctggtactgctatcttccatgctgaacgtccaagggacgtaattcatttcctacgaacgcaagtgaatgaagctcaggctcaactgaaagaggaatgggccaagagcggttgataacacgaagggtttcccatctgtgtgacctgatccctttttacgtttttttgttttgttttttcttttgttcatgatcaacttgggagtgattcctcttggtgatgtcgaaaattgaactgttataccaatattctgttgcctttgtttcctgtttgtagtttactactttttacagtagtcgttgttcctgccttgcttgcgtttgtcagggtttccctttagcttagtaccaatatctagccttaattttgcttattctttctcaccgcccatgattgatttcaatcatgattaatgatttatgcatgaaaactcaaaatactcaattgtcttgtacaaggcaatcacaagctggtcagccattctcagcgcctataagagctttcagccaggccggccccaaaacgatctaccctgtggacctggctaggctaaactttggaaagtcatgcaattatgaacgtttgaagctcaagcgctcctaccctctcctggagcagtgcttgaagactgagtccgtctcagactcagtatcggcatctctgtctttagctacgatggtgtgcgtgtaactgatcagtacacccgctgtatcaaaactctatcttcaatccgctaagaatcgtcaccatcagtacatcagtacatcagtgggctaagatctaatggtgtcgttcgacggccgcgggcactagccacgagccaagagcggtacagttgctgcgaaatggtgggcagcctgacaggttcagtttgaataggatgaaaacgccatgaagaacagagaagctggcaattgacgatagtggggcgagcgcacgctgcttgctggtccgagcgtaggacgaacgacaaaccatgggcggggccaccaggccccagggagggcgtcactggttggatgtcgtctgttaggctagagctcaggcgctcagggcctctggcccaagcctcggacgcaagcctctgacgagcgagcgcgcgctggggcgggtctgcgcaggaacggcaggactgccgagttggttgaatattgaatggttggatgattggtttgctgggtttggttttgacacgcacggcacaggacaagtgagtttggaggttggatttgcgcaggtagaaagggcgctcggcctcagggcctcagcgtcagcagacgagctcgccagtccaggtcagtacccagtgttcgttacttcccaccgtccagagtttgctgctgcctctcagcttgattcgtgtcggagaagtagaaatggtcacagcgtaccacacactgtccccatgcctgcgtcctgctccacgagtgtttagccacaaaaatttatggacaaccttactgagcctgtgctggggggtgctttagcaccagcactggcgccatggcgtcaaggttaattccactgtcattcgacaaccttcaactgatgggggcaactgggcacaaaaccttggatatataaccaactccaactcccacggttttttaccttttgctcttctccccaggactcactacttctactcctctattcatcttcaccaaaatggttaccgagatcgaagtggatgcggtgctgttcgacatggacggcaccctgattgactctacccctgctgtcaaccagacttgggccgagtacatcgaacgatacaacctcgactttgactacgtcatgtctcattgtcacggatgtcgaacggtagagagcctcaagaatatcgttggattgccggatgaccagttggaacaaggcgtagtcgagtttgaagggcgtattagtgaactggctgaagaggcggcacgtaccaatggtcctggtcaaattgtggctttgcccggcgcaaaagaactgcttgcccaactgaacaagggtagcgaacaacctggtcgtcgtcctggatgggccatcgttacttcggcaaccaaggcttacgcttacgtgggcttcagagcgtcgggcgtgaatggtacagaattccctcgtgcttttgtcacgggtgacaatgtcagcaagggcaaacctgatcctgaaccatacctcttgggagcaaagacgttacaacctcctgctgatcctaaacgttgtctcgtaatcgaagatgctcctccaggtattcgatcaggtgttgctgcaggtgccaaaacccttggattgaccactacccacgcggaaaacctcatgtggcaagcgggtgctaactgggtcgtaccagacttatcgagtgtttcggcacgttgggaaggtgaaggtgcggacgctcgtctttttattcgcattgaaaactcaggccagcgtccagagtaacatggtctgagccgcccacgattccttccttcatgagcgtatgacgacccttttacttagcatgtgcctctaaagaatacgttttgcatacccacatattcgtaaccctgtcctctatagcttctacaggtcatagtcactggctgccagtataaacgtgtcaatatctaatcctcataagatgcctcgctctgtcgtccacaataaaattcagtaacgcaaggactgcgcgactgagtgattgccgatgatatgagaaaactaatttcaagccatttgaacttcaataaatgcttccgctaacatcacggatcatcgatcatcaaccagcctccattaataggcctgccaccactcgcgcaatcatgaatctgatcatacctggctagcgattctcataacaccagaattacctgcccattaaagaaaccctattctgcctgtaacccggcaccagccggtccgaattcacgacagactaaggctctcgcgcagcttgaagactgagtccgtctcagataacttcgtataatgtatgctatacgaagttatcctgcaggagctcagaccttgcatgttagccttgaccttgcctctatgaccactaattcgcacaagattgcacgttaccattgtcatcttgccatgtatccaatgtttcctgtttgccatagtacgtagtagatacatcgatcatcgatgcagatgacgcagatggcattggttcgctttgccctatgcatgcatcatgcatcatgcatcatgcgtcatgcgtcactatccatattaatcattgccctctgtactaggccatgacacctgcagacccttccccagggatgcttcttgtaatagccaatatactacacaactttaccgattacgatcgagatcgatctcactatagtttgtcgaacttcgatgcacatcgagggtgcggaaaaaagctgacggaagcggaagtgggtgaattggttaatttagttagattggcagggttgttcccaagattcaacgcaagctgagaaagaaaacagaaacacgaggcataaggccagtcagaaaatgcattacgaggggagttgaagtgactgtgggccagtgcctgggtcgtcatgtgcaaattttttcttcggttagactgccgcagcatgcagcaactctgccggccctatataactagtgcttcatcttcttgtcattcttgtctctttaccaacacaccggtactctttcaccatgggtaaggaaaagacacacgtatcgcgaccccgactcaactccaacatggacgcagacctgtacggatacaaatgggctcgagataatgtcggacagtcgggtgcgacgatctacagactctatggaaaaccggacgcccccgagctctttcttaaacacggcaagggtagcgttgcaaacgacgtaaccgacgaaatggtccgtctgaattggctaactgagttcatgccactccccaccatcaagcacttcatccgtacacctgacgatgcgtggctgttgactacggccatccccggtaagaccgcttttcaggtcctcgaggaataccctgactcgggcgagaacatcgtggatgccttggctgtgtttttgcgccgccttcactctattccggtctgcaactgccctttcaacagcgaccgtgtttttaggcttgcccaggcacaatcacgcatgaacaatggtctagtcgacgctagtgatttcgatgacgagcgcaacggctggccggtggaacaagtgtggaaagagatgcataagctcctgcccttttccccagactctgtcgtgacgcatggtgatttctcgcttgacaacctcatctttgacgagggcaagctcattggctgcattgacgtcggccgggttggcatcgccgatcgctaccaagatcttgcgatcctctggaattgtctgggcgagttctcccctagcctccagaagcgtctgttccagaaatatgggatcg